(19) United States
(12) Patent Application Publication
(10) Pub. No.: US 2024/0016956 A1
(43) Pub. Date: Jan. 18, 2024

(54) METHODS AND COMPOSITIONS FOR RESTRICTING BIODISTRIBUTION OF AAV

(71) Applicants: AFFINIA THERAPEUTICS INC., Waltham, MA (US); MASSACHUSETTS EYE AND EAR INFIRMARY, Boston, MA (US); THE SCHEPENS EYE RESEARCH INSTITUTE, INC., Boston, MA (US)

(72) Inventors: Roberto CALCEDO DEL HOYO, Waltham, MA (US); Luc H. VANDENBERGHE, Boston, MA (US)

(21) Appl. No.: 18/036,135

(22) PCT Filed: Nov. 9, 2021
(86) PCT No.: PCT/US2021/058572

§ 371 Date: May 9, 2023

Related U.S. Application Data
(60) Provisional application No. 63/256,437, filed on Oct. 15, 2021.
(60) Provisional application No. 63/111,496, filed on Nov. 9, 2020.

(51) Int. Cl. A61K 48/00; C12N 15/86; A61K 39/42; C07K 16/08; A61P 39/00

(52) U.S. Cl. CPC A61K 48/0083; C12N 15/86; A61K 39/42; C07K 16/081; A61P 39/00; C12N 2750/14143; C12N 2750/14171; A61K 2039/505

(57) ABSTRACT

The present disclosure relates to an improved method of treating a patient with a recombinant adeno-associated virus (rAAV) by adjunctively administering to the patient via systemic administration a composition comprising at least one antibody or antigen-binding fragments thereof that is capable of neutralizing the non-systemically administered rAAV. The present disclosure further provides kits for the combination therapy.

### 1. CROSS-REFERENCE TO RELATED APPLICATIONS

[0001] This application claims the benefit of U.S. Provisional Application Ser. Nos.: 63/111,496, filed Nov. 9, 2020 and 63/256,437, filed Oct. 15, 2021, the disclosures of which are hereby incorporated in their entireties by reference.

### 2. SEQUENCE LISTING

[0002] The instant application contains a Sequence Listing, which has been submitted via EFS-Web and is hereby incorporated herein by reference in its entirety. Said ASCII copy, created on Month XX, 2021, is named 47299WO_CRF_sequencelisting.txt, and is XXX bytes in size.

### 3. BACKGROUND

[0003] Adeno-associated virus (AAV) has become the vector system of choice for in vivo gene therapy. A growing variety of recombinant AAVs (rAAVs) engineered to deliver therapeutic nucleic acids have been developed and tested in in nonhuman primates and humans, and the FDA has recently approved two rAAV gene therapy products for commercialization.

[0004] Although AAV vectors are safer and less inflammatory than other viruses, toxicities have occurred following administration of high doses of rAAVs for gene therapy. Acute development of thrombocytopenia and transaminitis and liver damage have been observed in nonhuman primate studies, and liver dysfunction, acute elevation of liver enzymes, and reductions in platelets have been observed in human clinical studies. Recently, several deaths were reported in an rAAV gene therapy clinical trial for treatment of a genetic neuromuscular disorder.

[0005] While local administration of rAAVs to a target tissue or organ has been used to improve targeting and reduce systemic toxicity, complete localization is not possible, and several serotypes of AAV exhibited transduction in tissues distal from the injection site, risking systemic toxicity.

[0006] Accordingly, there is a need for methods of restricting AAV biodistribution to target tissue and organs following local or regional administration, while reducing or eliminating systemic circulation and transduction of non-target tissues and organs, such as the liver.

### 4. SUMMARY

[0007] The present disclosure relates to an improved method of treating a patient with an rAAV by adjunctively administering to the patient via systemic administration a composition comprising antibodies or antigen-binding fragments thereof that are capable of neutralizing the non-systemically administered rAAV.

[0008] Adjunctively administered neutralizing antibodies can restrict biodistribution of rAAVs to target tissues and organs by neutralizing AAVs in non-target organs and tissues. This adjunctive, systemic administration of neutralizing antibodies reduces: non-target transduction of rAAVs administered non-systemically that escape the target organs and tissues; systemic toxicity, and systemic immune responses that travel to the target tissue and organs transduced by rAAVs.

[0009] Aspects of the present disclosure include an improved method of treating a patient by non-systemic administration of a recombinant adeno-associated virus (rAAV). The improvement comprises adjunctively administering to the patient via systemic administration a composition comprising at least one antibody or antigen-binding fragment thereof that is capable of neutralizing the non-systemically administered rAAV.

[0010] In some embodiments, the at least one antibody or antigen-binding fragment binds to at least one capsid protein of the rAAV. In some embodiments, the rAAV has a capsid protein of an AAV selected from: AAV2; AAV1; AAV6; AAV3; AAV LK03; AAV7; AAV8; AAV hu.37; AAV rh.10; AAV9; AAV hu.68; AAV10; AAV5; AAV3-3; AAV4-4; AAV1-A; hu.46-A; hu.48-A; hu.44-A; hu.43-A; AAV6-A; hu.34-B; hu.47-B; hu.29-B; rh.63-B; hu.56-B; hu.45-B; rh.57-B; rh.35-B; rh.58-B; rh.28-B; rh.51-B; rh.19-B; rh.49-B; rh.52-B; rh.13-B; AAV2-B; rh.20-B; rh.24-B; rh.64-B; hu.27-B; hu.21-B; hu.22-B; hu.23-B; hu.7-C; hu.61-C; rh.56-C; hu. 9-C; hu.54-C; hu.53-C; hu.60-C; hu.55-C; hu.2-C; hu.1-C; hu.18-C; hu.3-C; hu.25-C; hu.15-C; hu.16-C; hu.11-C; hu.10-C; hu.4-C; rh.54-D; rh.48-D; rh.55-D; rh.62-D; AAV7-D; rh.52-E; rh.51-E; hu.39-E; rh.53-E; hu.37-E; rh.43-E; rh.50-E; rh.49-E; rh.61-E; hu.41-E; rh.64-E; hu.42-E; rh.57-E; rh.40-E; hu.67-E; hu.17-E; hu.6-E; hu.66-E; rh.38-E; hu.32-F; AAV9/hu; hu.31-F; Anc80; Anc81; Anc82; Anc83; Anc84; Anc94; Anc113; Anc126; Anc127; Anc80L27; Anc80L59; Anc80L60; Anc80L62; Anc80L65; Anc80L33; Anc80L36; Anc80L44; Anc80L1; Anc110; and Anc80DI.

[0011] In some embodiments, the at least one antibody is an IgG antibody.

[0012] In some embodiments, the composition is capable of neutralizing an rAAV selected from AAV2; AAV1; AAV6; AAV3; AAV LK03; AAV7; AAV8; AAV hu.37; AAV rh.10; AAV9; AAV hu.68; AAV10; AAV5; AAV3-3; AAV4-4; AAV1-A; hu.46-A; hu.48-A; hu.44-A; hu.43-A; AAV6-A; hu.34-B; hu.47-B; hu.29-B; rh.63-B; hu.56-B; hu.45-B; rh.57-B; rh.35-B; rh.58-B; rh.28-B; rh.51-B; rh.19-B; rh.49-B; rh.52-B; rh.13-B; AAV2-B; rh.20-B; rh.24-B; rh.64-B; hu.27-B; hu.21-B; hu.22-B; hu.23-B; hu.7-C; hu.61-C; rh.56-C; hu. 9-C; hu.54-C; hu.53-C; hu.60-C; hu.55-C; hu.2-C; hu.1-C; hu.18-C; hu.3-C; hu.25-C; hu.15-C; hu.16-C; hu.11-C; hu.10-C; hu.4-C; rh.54-D; rh.48-D; rh.55-D; rh.62-D; AAV7-D; rh.52-E; rh.51-E; hu.39-E; rh.53-E; hu.37-E; rh.43-E; rh.50-E; rh.49-E; rh.61-E; hu.41-E; rh.64-E; hu.42-E; rh.57-E; rh.40-E; hu.67-E; hu.17-E; hu.6-E; hu.66-E; rh.38-E; hu.32-F; AAV9/hu; hu.31-F; Anc80; Anc81; Anc82; Anc83; Anc84; Anc94; Anc113; Anc126; Anc127; Anc80L27; Anc80L59; Anc80L60; Anc80L62; Anc80L65; Anc80L33; Anc80L36; Anc80L44; Anc80L1; Anc110; and Anc80DI.

[0013] In some embodiments, the composition comprises a monoclonal antibody.

[0014] In some embodiments, the composition comprises polyclonal antibodies comprising a mixture of monoclonal antibodies.

[0015] In some embodiments, the composition comprises polyclonal antibodies obtained from at least 100 donors. In some embodiments, the polyclonal antibodies obtained from at least 500, at least 1000, at least 5000, or at least 10,000 donors.

[0016] In some embodiments, the composition is intravenous immunoglobulin (IVIG). In some embodiments, the IVIG is a pool of antibodies obtained from: Gammagard™ Liquid® (Baxter HealthCare Corp), Gammagard™ S/D, Gammaplex™, Bivigam™, Carimune™ NF, Gamunex-C, Gammaked™, Flebogamma™ DIF, Octagam™, and Privigen™.

[0017] In some embodiments, the composition comprises recombinant polyclonal antibodies. In some embodiments, the composition comprises recombinant IVIG (rIVIG).

[0018] In some embodiments, the at least one antibody is an antigen-binding fragment selected from: a single chain FIT (scFv), a Fab, a (Fab′)₂, and an (ScFv)₂. In some embodiments, the composition comprises: a bispecific antibody, a single-domain antibody (dAb), a diabody (db), a nanobody, and a unibody.

[0019] In some embodiments, the composition is administered by intravenous injection or infusion.

[0020] In some embodiments, the composition is IVIG and the IVIG is administered at a dose ranging from 1-2000 mg/kg patient weight. In some embodiments, the IVIG is administered at a dose ranging from 1-2 mg/kg patient weight. In some embodiments, IVIG is administered at a dose ranging from 1-10 mg/ml. In some embodiments, the IVIG is administered at a dose ranging from 1-4 mg/ml. In some embodiments, IVIG is administered as a single-dose. In some embodiments, the IVIG is administered daily.

[0021] In some embodiments, the IVIG is administered 2 times a day, three times a day, or four times a day.

[0022] In some embodiments, the IVIG is administered 2 times a day, three times a day, or four times a day. In some embodiments, the IVIG is administered for no more than one week.

[0023] In some embodiments, the IVIG is administered for at least 5 minutes, at least 10 minutes, at least 15 minutes, at least 20 minutes, at least 25 minutes, or at least 30 minutes.

[0024] In some embodiments, the composition is administered before administration of the rAAV to the patient. In some embodiments, the composition is administered at least 30 minutes before, at least 1 hour before, at least 2 hours before, at least 4 hours before at least 6 hours before, at least 12 hours, or at least 24 hours before, administration of the rAAV to the patient. In some embodiments, the composition is administered 30 minutes before, 1 hour before, 2 hours before, 4 hours before, 6 hours before, 12 hours before, or 24 hours before, administration of the rAAV to the patient. In some embodiments, the composition is administered no more than one week before administration of the rAAV to the patient.

[0025] In some embodiments, the composition is administered after administration of the rAAV to the patient. In some embodiments, the composition is administered no more than 30 minutes after, at least 1 hour after, at least 2 hours after, at least 4 hours after, at least 6 hours after, at least 24 hours after, or no more than one week after administration of the rAAV to the patient.

[0026] In some embodiments, the composition is administered on the same day as administration of the rAAV to the patient.

[0027] In some embodiments, the composition is administered at a sufficient amount to alter biodistribution of the rAAV following administration to the patient.

[0028] In some embodiments, altering rAAV biodistribution reduces infection of liver cells. In some embodiments, altering rAAV biodistribution reduces infection of cells outside of the target site.

[0029] In some embodiments, the composition is administered at a sufficient amount to reduce liver toxicity of the rAAV following administration to the patient. In some embodiments, the composition is administered at a sufficient amount to reduce toxicity of the rAAV outside of the target site following administration to the patient.

[0030] In some embodiments, the composition is administered at a sufficient amount to neutralize rAAV released from the target site.

[0031] In some embodiments, the target site is selected from: brain, spinal cord, muscle, eye, and ear of the patient. In some embodiments, the target site is not within the central nervous system of the patient.

[0032] Aspects of the present disclosure include a method of treating a patient comprising the steps of: non-systemically administering to a target site of the patient a first pharmaceutical composition comprising a recombinant adeno associated virus (rAAV); and adjunctively administering to the patient via systemic administration a second pharmaceutical composition comprising at least one antibody that is capable of neutralizing the non-systemically administered rAAV.

[0033] In some embodiments, the at least one antibody binds to a capsid protein of the rAAV. In some embodiments, the rAAV has a capsid protein of an AAV selected from: AAV2; AAV1; AAV6; AAV3; AAV LK03; AAV7; AAV8; AAV hu.37; AAV rh.10; AAV9; AAV hu.68; AAV10; AAV5; AAV3-3; AAV4-4; AAV1-A; hu.46-A; hu.48-A; hu.44-A; hu.43-A; AAV6-A; hu.34-B; hu.47-B; hu.29-B; rh.63-B; hu.56-B; hu.45-B; rh.57-B; rh.35-B; rh.58-B; rh.28-B; rh.51-B; rh.19-B; rh.49-B; rh.52-B; rh.13-B; AAV2-B; rh.20-B; rh.24-B; rh.64-B; hu.27-B; hu.21-B; hu.22-B; hu.23-B; hu.7-C; hu.61-C; rh.56-C; hu. 9-C; hu.54-C; hu.53-C; hu.60-C; hu.55-C; hu.2-C; hu.1-C; hu.18-C; hu.3-C; hu.25-C; hu.15-C; hu.16-C; hu.11-C; hu.10-C; hu.4-C; rh.54-D; rh.48-D; rh.55-D; rh.62-D; AAV7-D; rh.52-E; rh.51-E; hu.39-E; rh.53-E; hu.37-E; rh.43-E; rh.50-E; rh.49-E; rh.61-E; hu.41-E; rh.64-E; hu.42-E; rh.57-E; rh.40-E; hu.67-E; hu.17-E; hu.6-E; hu.66-E; rh.38-E; hu.32-F; AAV9/hu; hu.31-F; Anc80; Anc81; Anc82; Anc83; Anc84; Anc94; Anc113; Anc126; Anc127; Anc80L27; Anc80L59; Anc80L60; Anc80L62; Anc80L65; Anc80L33; Anc80L36; Anc80L44; Anc80L1; Anc110; and Anc80DI. In some embodiments, the AAV is AAV8 or AAV9. In some embodiments, the AAV is rh.10. In some embodiments, the AAV is hu.68.

[0034] In some embodiments, the antibody is an IgG antibody.

[0035] In some embodiments, the second pharmaceutical composition is capable of neutralizing an AAV selected from AAV2; AAV1; AAV6; AAV3; AAV LK03; AAV7; AAV8; AAV hu.37; AAV rh.10; AAV9; AAV hu.68; AAV10; AAV5; AAV3-3; AAV4-4; AAV1-A; hu.46-A; hu.48-A; hu.44-A; hu.43-A; AAV6-A; hu.34-B; hu.47-B; hu.29-B; rh.63-B; hu.56-B; hu.45-B; rh.57-B; rh.35-B; rh.58-B; rh.28-B; rh.51-B; rh.19-B; rh.49-B; rh.52-B; rh.13-B; AAV2-B; rh.20-B; rh.24-B; rh.64-B; hu.27-B; hu.21-B; hu.22-B; hu.23-B; hu.7-C; hu.61-C; rh.56-C; hu. 9-C; hu.54-C; hu.53-C; hu.60-C; hu.55-C; hu.2-C; hu.1-C; hu.18-C; hu.3-C; hu.25-C; hu.15-C; hu.16-C; hu.11-C; hu.10-C; hu.4-C; rh.54-D; rh.48-D; rh.55-D; rh.62-D; AAV7-D; rh.52-E; rh.51-E; hu.39-E; rh.53-E; hu.37-E; rh.43-E; rh.50-E; rh.49-E; rh.61-E; hu.41-E; rh.64-E; hu.42-E; rh.57-E; rh.40-E; hu.67-E; hu.17-E; hu.6-E; hu.66-E; rh.38-E; hu.32-F; AAV9/hu; hu.31-F; Anc80; Anc81; Anc82; Anc83; Anc84; Anc94; Anc113; Anc126; Anc127; Anc80L27; Anc80L59; Anc80L60; Anc80L62; Anc80L65; Anc80L33; Anc80L36; Anc80L44; Anc80L1; Anc110; and Anc80DI.

[0036] In some embodiments, the at least one antibody is a monoclonal antibody. In some embodiments, the second pharmaceutical composition comprises polyclonal antibodies comprising a mixture of monoclonal antibodies.

[0037] In some embodiments, the second pharmaceutical composition comprises polyclonal antibodies obtained from at least 100 donors. In some embodiments, the second pharmaceutical composition comprises polyclonal antibodies obtained from at least 500, 1000, 5000, or 10,000 donors.

[0038] In some embodiments, the second pharmaceutical composition comprises intravenous immunoglobulin (IVIG). In some embodiments, the IVIG is a pool of antibodies obtained from: Gammagard™ Liquid® (Baxter HealthCare Corp), Gammagard™ S/D, Gammaplex™, Bivigam™, Carimune™ NF, Gamunex-C, Gammaked™, Flebogamma™ DIF, Octagam™, and Privigen™.

[0039] In some embodiments, the second pharmaceutical composition comprises recombinant polyclonal antibodies.

[0040] In some embodiments, the second pharmaceutical composition comprises recombinant IVIG (rIVIG). In some embodiments, the at least one antibody comprises an antigen-binding fragment selected from: a single chain FIT (scFv), a Fab, a (Fab′)₂, and an (ScFv)₂.

[0041] In some embodiments, the at least one antibody comprises: a bispecific antibody, a single-domain antibody (dAb), a diabody (db), a nanobody, a unibody, and a diabody.

[0042] In some embodiments, the first pharmaceutical composition is administered locally.

[0043] In some embodiments, the target site is within the central nervous system. In some embodiments, the target site is selected from: brain, spinal cord, muscle, eye, and ear of the patient.

[0044] In some embodiments, the first pharmaceutical composition is administered by: intrathecal injection or infusion, intraocular injection, intravitreal injection or infusion, inner ear injection or infusion, intracerebroventricular injection or infusion, intracisternal magna injection (ICM) or infusion, subretinal injection or infusion, or intramuscular injection or infusion. In some embodiments, intrathecal injection or infusion is lumbar injection or infusion. In some embodiments, the first pharmaceutical composition is administered to the brain or spinal cord by intracerebral, intrathecal, intracranial, intracerebroventricular, or cisterna magna administration.

[0045] In some embodiments, the second pharmaceutical composition is administered systemically. In some embodiments, the second pharmaceutical composition is administered by intravenous injection or infusion.

[0046] In some embodiments, the second pharmaceutical composition comprises IVIG and the IVIG is administered at a dose ranging from 1-2000 mg/kg.

[0047] In some embodiments, the IVIG is administered at a dose ranging from 1-2 mg/kg. In some embodiments, the IVIG is administered at a dose ranging from 1-10 mg/ml. In some embodiments, the IVIG is administered at a dose ranging from 1-4 mg/ml. In some embodiments, IVIG is administered as a single-dose.

[0048] In some embodiments, the IVIG is administered daily. In some embodiments, the IVIG is administered at least 2 times a day.

[0049] In some embodiments, the second pharmaceutical composition is administered before administration of the first pharmaceutical composition to the patient.

[0050] In some embodiments, the second pharmaceutical composition is administered at least 30 minutes before, at least 1 hour before, at least 2 at least 6 hours, at least 12 hours or at least 24 hours before administration of the first pharmaceutical composition to the patient. In some embodiments, the second pharmaceutical composition is administered 30 minutes before, 1 hour before, 2 hours, 6 hours, 12 hours or 24 hours before administration of the first pharmaceutical composition to the patient.

[0051] In some embodiments, the second pharmaceutical composition is administered at least one day before, at least one week before, or at least two weeks before administration of the first pharmaceutical composition to the patient.

[0052] In some embodiments, the second pharmaceutical composition is administered after administration of the first pharmaceutical composition to the patient.

[0053] In some embodiments, the second pharmaceutical composition is administered at least 30 minutes after, at least 1 hour after, or at least 2 hours after administration of the first pharmaceutical composition to the patient.

[0054] In some embodiments, the second pharmaceutical composition is administered at least one day after, at least two days after, or at least one week after administration of the first pharmaceutical composition to the patient.

[0055] In some embodiments, the first pharmaceutical composition and the second pharmaceutical composition are administered on the same day.

[0056] In some embodiments, the second pharmaceutical composition is administered at a sufficient amount to alter biodistribution of the rAAV following administration to the patient.

[0057] In some embodiments, altering AAV biodistribution reduces rAAV infection of liver cells. In some embodiments, altering AAV biodistribution reduces rAAV infection of cells outside of the target site.

[0058] In some embodiments, the second pharmaceutical composition is administered at a sufficient amount to reduce liver toxicity of the rAAV following administration to the patient.

[0059] In some embodiments, the second pharmaceutical composition is administered at a sufficient amount to reduce toxicity of the rAAV outside of the target site following administration to the patient.

[0060] In some embodiments, the target site is selected from: brain, spinal cord, muscle, eye, and ear of the patient.

[0061] In some embodiments, the target site is not within the central nervous system.

[0062] Aspects of the present disclosure include a kit for a combination therapy comprising: a first pharmaceutical composition comprising a recombinant adeno associated virus (rAAV); and a second pharmaceutical composition comprising at least one antibody capable of neutralizing non-systemically administered rAAV of the first pharmaceutical composition.

[0063] In some embodiments, the at least one antibody binds to a capsid protein of the rAAV. In some embodiments, the capsid protein of an AAV is selected from AAV2; AAV1; AAV6; AAV3; AAV LK03; AAV7; AAV8; AAV hu.37; AAV rh.10; AAV9; AAV hu.68; AAV10; AAV5; AAV3-3; AAV4-4; AAV1-A; hu.46-A; hu.48-A; hu.44-A; hu.43-A; AAV6-A; hu.34-B; hu.47-B; hu.29-B; rh.63-B; hu.56-B; hu.45-B; rh.57-B; rh.35-B; rh.58-B; rh.28-B; rh.51-B; rh.19-B; rh.49-B; rh.52-B; rh.13-B; AAV2-B; rh.20-B; rh.24-B; rh.64-B; hu.27-B; hu.21-B; hu.22-B; hu.23-B; hu.7-C; hu.61-C; rh.56-C; hu. 9-C; hu.54-C; hu.53-C; hu.60-C; hu.55-C; hu.2-C; hu.1-C; hu.18-C; hu.3-C; hu.25-C; hu.15-C; hu.16-C; hu.11-C; hu.10-C; hu.4-C; rh.54-D; rh.48-D; rh.55-D; rh.62-D; AAV7-D; rh.52-E; rh.51-E; hu.39-E; rh.53-E; hu.37-E; rh.43-E; rh.50-E; rh.49-E; rh.61-E; hu.41-E; rh.64-E; hu.42-E; rh.57-E; rh.40-E; hu.67-E; hu.17-E; hu.6-E; hu.66-E; rh.38-E; hu.32-F; AAV9/hu; hu.31-F; Anc80; Anc81; Anc82; Anc83; Anc84; Anc94; Anc113; Anc126; Anc127; Anc80L27; Anc80L59; Anc80L60; Anc80L62; Anc80L65; Anc80L33; Anc80L36; Anc80L44; Anc80L1; Anc110; and Anc80DI.

[0064] In some embodiments, the at least one antibody comprises IgG.

[0065] In some embodiments, the second pharmaceutical composition is capable of neutralizing an AAV selected from AAV2; AAV1; AAV6; AAV3; AAV LK03; AAV7; AAV8; AAV hu.37; AAV rh.10; AAV9; AAV hu.68; AAV10; AAV5; AAV3-3; AAV4-4; AAV1-A; hu.46-A; hu.48-A; hu.44-A; hu.43-A; AAV6-A; hu.34-B; hu.47-B; hu.29-B; rh.63-B; hu.56-B; hu.45-B; rh.57-B; rh.35-B; rh.58-B; rh.28-B; rh.51-B; rh.19-B; rh.49-B; rh.52-B; rh.13-B; AAV2-B; rh.20-B; rh.24-B; rh.64-B; hu.27-B; hu.21-B; hu.22-B; hu.23-B; hu.7-C; hu.61-C; rh.56-C; hu. 9-C; hu.54-C; hu.53-C; hu.60-C; hu.55-C; hu.2-C; hu.1-C; hu.18-C; hu.3-C; hu.25-C; hu.15-C; hu.16-C; hu.11-C; hu.10-C; hu.4-C; rh.54-D; rh.48-D; rh.55-D; rh.62-D; AAV7-D; rh.52-E; rh.51-E; hu.39-E; rh.53-E; hu.37-E; rh.43-E; rh.50-E; rh.49-E; rh.61-E; hu.41-E; rh.64-E; hu.42-E; rh.57-E; rh.40-E; hu.67-E; hu.17-E; hu.6-E; hu.66-E; rh.38-E; hu.32-F; AAV9/hu; hu.31-F; Anc80; Anc81; Anc82; Anc83; Anc84; Anc94; Anc113; Anc126; Anc127; Anc80L27; Anc80L59; Anc80L60; Anc80L62; Anc80L65; Anc80L33; Anc80L36; Anc80L44; Anc80L1; Anc110; and Anc80DI.

[0066] In some embodiments, the at least one antibody is a monoclonal antibody.

[0067] In some embodiments, the second pharmaceutical composition comprises polyclonal antibodies obtained from at least 100 donors. In some embodiments, the second pharmaceutical composition comprises polyclonal antibodies obtained from at least 500, 1000, 5000, or 10,000 donors.

[0068] In some embodiments, the second pharmaceutical composition comprises intravenous immunoglobulin (IVIG).

[0069] In some embodiments, the second pharmaceutical composition comprises recombinant intravenous immunoglobulin (rIVIG).

[0070] In some embodiments, the IVIG is a pool of antibodies obtained from: Gammagard™ Liquid® (Baxter HealthCare Corp), Gammagard™ S/D, Gammaplex™, Bivigam™, Carimune™ NF, Gamunex-C, Gammaked™, Flebogamma™ DIF, Octagam™, and Privigen™.

[0071] In some embodiments, the second pharmaceutical composition comprises recombinant polyclonal antibodies.

[0072] In some embodiments, the second pharmaceutical composition comprises an AAV-neutralizing antigen-binding fragment selected from: a single chain Fv (scFv), a Fab, a (Fab′)₂, and an (ScFv)₂.

[0073] In some embodiments, the second pharmaceutical composition comprises: a bispecific antibody, a single-domain antibody (dAb), a diabody (db), a nanobody, a unibody, and a diabody.

### 5. BRIEF DESCRIPTION OF THE SEVERAL VIEWS OF THE DRAWINGS

[0074] These and other features, aspects, and advantages of the present invention will become better understood with regard to the following description, and accompanying drawings where:

[0075] FIGS. 1A-1G show vector genome copy biodistribution in various tissues of mice treated with AAV9.CAG.GFP with or without administration of IVIG, as measured by ddPCR. Y-axis represents the ratio of eGFP DNA copy number over RPP30 DNA copy number and x-axis represents treatment conditions. Each graph shows eGFP expression in brain (FIG. 1A), liver (FIG. 1B), spleen (FIG. 1C), cervical DRG (FIG. 1D), lumbar DRG (FIG. 1E), heart (FIG. 1F), or kidney (FIG. 1G). Data points indicate individual animals, line indicates mean. Statistics were performed using One-Way ANOVA and Tukey's multiple comparisons test.

[0076] FIGS. 2A-2G show eGFP mRNA expression in various tissues of mice treated with AAV9.CAG.GFP with or without administration of IVIG, as measured by RT-ddPCR. Y-axis represents the ratio of eGFP transcripts over RPP30 transcripts and x-axis represents treatment conditions. Each graph shows eGFP expression in brain (FIG. 2A), liver (FIG. 2B), spleen (FIG. 2C), cervical/thoracic DRG (FIG. 2D), lumbar DRG (FIG. 2E), heart (FIG. 2F), or kidney (FIG. 2G). Data points indicate individual animals, line indicates mean. Statistics were performed using One-Way ANOVA and Tukey's multiple comparisons test.

[0077] FIGS. 3A-3G show anti-GFP immunohistochemistry data in various tissues of mice treated with AAV9.CAG.GFP with or without treatment with IVIG. Anti-GFP immunohistochemistry was performed on cross sections of brain (FIG. 3A), liver (FIG. 3B), spleen (FIG. 3C), cervical/thoracic DRG (FIG. 3D), lumbar DRG (FIG. 3E), heart (FIG. 3F), or kidney (FIG. 3G) of animals transduced with: saline; AAV9.CAG.GFP ICV; AAV9.CAG.GFP ICV with 2 hour IVIG; AAV9.CAG.GFP with 24 hour IVIG; or AAV9.CAG.GFP IV. Cells positive for GFP are stained brown (indicated as dark gray cells on FIGS. 3A-3G). DR—dorsal root. DRG—dorsal root ganglion.

### 6. DETAILED DESCRIPTION

### 6.1. Definitions

[0078] Unless defined otherwise, all technical and scientific terms used herein have the meaning commonly understood by a person skilled in the art to which this invention belongs. As used herein, the following terms have the meanings ascribed to them below.

[0079] The term “rAAV” as used herein refers to a virion comprising a recombinant nucleic acid construct packaged in an AAV capsid. The recombinant construct comprises a polynucleotide payload positioned between AAV inverted terminal repeats. The payload can be an expressible polynucleotide that encodes a protein (e.g., therapeutic protein) or a miRNA, siRNA, or guide RNA for gene editing machinery such as CRISPR. The payload can be a DNA homology construct for gene-editing promoted homology directed repair.

[0080] The term “neutralizing” or “neutralization” as used herein refers to a measurable decrease in the toxicity and/or circulating level of an AAV. The term “neutralizing antibody” refers to an antibody capable of decreasing the toxicity and/or circulating level of an AAV. Neutralizing antibodies can bind to a virus in a manner that blocks infection, blocks interactions with the receptor, inhibits uncoating of the genome, aggregates the virus, induces structural alteration in the capsid, prevents viral disassembly and uncoating (a step necessary to release the DNA), etc. Some neutralizing antibodies have several of these effects.

[0081] The term “antibody” (also used interchangeably with “immunoglobulin”) encompasses polyclonal, monoclonal, and allogeneic antibody preparations where the antibody may be of any class of interest (e.g., IgM, IgG, IgA, and subclasses thereof), as well as preparations including hybrid antibodies, altered antibodies, F(ab′)₂ fragments, F(ab) molecules, FIT fragments, single chain fragment variable displayed on phage (scFv), nanobodies, single chain antibodies, single domain antibodies, chimeric antibodies, humanized antibodies, and functional fragments thereof which exhibit immunological binding properties of the parent antibody molecule. The antibodies may be conjugated to other moieties, and/or may be bound to a support (e.g., a solid support), such as a polystyrene plate or bead, test strip, and the like.

[0082] Antibodies and fragments of the present disclosure encompass those that are bispecific or multispecific. Bispecific or multispecific antibodies useful in the methods described herein may have binding specificities for at least two different epitopes, at least one of which is an epitope of a rAAV. The rAAV binding antibodies and fragments can also be heteroantibodies. Heteroantibodies are two or more antibodies, or antibody binding fragments (e.g., Fab) linked together, each antibody or fragment having a different specificity.

[0083] The phrase “binds to”, “specifically binds to” or “specifically immunoreactive with”, when referring to an antibody refers to a binding reaction which is determinative of the presence of the protein in the presence of a heterogeneous population of proteins and other biologics. Thus, under designated immunoassay conditions, the specified antibodies bind to a particular protein and do not bind in a significant amount to other proteins present in the sample. Specific binding to a protein or virion under such conditions may require an antibody that is selected for its specificity for a particular protein. For example, AAV-neutralizing antibodies can be raised to AAV7 that specifically bind to AAV7 virions, and not to other virions present in tissue, organs, or bodily fluids. A variety of immunoassay formats may be used to select antibodies specifically immunoreactive with a particular protein. For example, solid-phase ELISA immunoassays are routinely used to select monoclonal antibodies specifically immunoreactive with a protein.

[0084] The term “biodistribution” as used herein refers to the spread of AAV after administration, and its localization and persistence in tissues, body fluids, or organs. For example, biodistribution of the AAV can include the amount of vector uptake and transduction to and into cells in the liver or other organs, and expression of an expressible polynucleotide, such as a polynucleotide expressing a transgene, RNA, or DNA. In some embodiments, biodistribution analysis includes, but is not limited to, quantification of the expression of viral genomes by qPCR and deep sequencing, and AAV infection.

[0085] The term “AAV capsid protein” as used herein refers to a VP1, VP2, or VP3 capsid protein of a naturally occurring AAV serotype or a non-naturally occurring VP1, VP2, or VP3 capsid protein available or known in the art.

[0086] The term “adjunctive administration” or “adjunctively administering” refers to administering one therapeutic agent in sufficient temporal proximity to the other therapeutic agent to provide an effect. Adjunctive administration includes administration of one therapeutic agent concurrent with (at the same time), sequential to (at a different time but on the same day, e.g., during the same patient visit), or separate from (on a different day) administration of the other therapeutic agent.

[0087] The term “IVIG” or “intravenous immunoglobulin” as used herein has the meaning commonly understood in the clinical art. IVIG includes a concentrated and diverse collection of antibodies against many antigens. IVIG is usually administered to a subject intravenously but can be administered in a different route.

[0088] The term “polyclonal antibodies” as used herein refers to a population of heterogeneous antibodies which are usually produced by different B cell clones. They can recognize and bind to many different epitopes of a single antigen or to many antigens. Polyclonal antibodies can be either monospecific or polyspecific. Polyclonal antibodies can be, but are not limited to, a mixture of monoclonal antibodies.

[0089] The term “recombinant polyclonal antibodies” as used herein refers to a population of heterogenous antibodies produced by a library of recombinant constructs, each of the recombinant constructs containing a coding sequence of an antibody or an antigen binding fragment. The recombinant polyclonal antibodies can recognize and bind to many different epitopes of a single antigen. In some embodiments, the recombinant polyclonal antibodies recognize and bind to many different antigens.

[0090] The term “target site” as used herein refers to a cell, tissue, organ or body part where a composition is administered.

[0091] Throughout this specification and claims, “composition” and “pharmaceutical composition” are used interchangeably.

[0092] Throughout this specification and claims, the word “comprise” or variations such as “comprises” or “comprising”, will be understood to imply the inclusion of a stated integer or group of integers but not the exclusion of any other integer or group of integers.

[0093] Before the present invention is further described, it is to be understood that this invention is not limited to particular embodiments described, as such may, of course, vary. It is also to be understood that the terminology used herein is for the purpose of describing particular embodiments only, and is not intended to be limiting, since the scope of the present invention will be limited only by the appended claims.

[0094] Where a range of values is provided, it is understood that each intervening value, to the tenth of the unit of the lower limit unless the context clearly dictates otherwise, between the upper and lower limit of that range and any other stated or intervening value in that stated range, is encompassed within the invention. The upper and lower limits of these smaller ranges may independently be included in the smaller ranges, and are also encompassed within the invention, subject to any specifically excluded limit in the stated range. Where the stated range includes one or both of the limits, ranges excluding either or both of those included limits are also included in the invention.

[0095] Although methods and materials similar or equivalent to those described herein can be used in the practice or testing of the methods and compositions of matter, suitable methods and materials are described below. In addition, the materials, methods, and examples are illustrative only and not intended to be limiting. All publications, patent applications, patents, and other references mentioned herein are incorporated by reference in their entirety.

[0096] It must be noted that as used herein and in the appended claims, the singular forms “a,” “an,” and “the” include plural referents unless the context clearly dictates otherwise. Thus, for example, reference to “an antibody or antigen binding fragment” includes a plurality of such antibodies and antigen binding fragments and reference to “the recombinant adeno-associated virus” includes reference to one or more recombinant adeno-associated viruses and equivalents thereof known to those skilled in the art, and so forth. It is further noted that the claims may be drafted to exclude any optional element. As such, this statement is intended to serve as antecedent basis for use of such exclusive terminology as “solely,” “only” and the like in connection with the recitation of claim elements, or use of a “negative” limitation.

[0097] It is appreciated that certain features of the invention, which are, for clarity, described in the context of separate embodiments, may also be provided in combination in a single embodiment. Conversely, various features of the invention, which are, for brevity, described in the context of a single embodiment, may also be provided separately or in any suitable sub-combination. All combinations of the embodiments pertaining to the invention are specifically embraced by the present invention and are disclosed herein just as if each and every combination was individually and explicitly disclosed. In addition, all sub-combinations of the various embodiments and elements thereof are also specifically embraced by the present invention and are disclosed herein just as if each and every such sub-combination was individually and explicitly disclosed herein.

[0098] The publications discussed herein are provided solely for their disclosure prior to the filing date of the present application. Nothing herein is to be construed as an admission that the present invention is not entitled to antedate such publication by virtue of prior invention. Further, the dates of publication provided may be different from the actual publication dates which may need to be independently confirmed.

[0099] 6.2. Other Interpretational Conventions

[0100] Ranges recited herein are understood to be shorthand for all of the values within the range, inclusive of the recited endpoints. For example, a range of 1 to 50 is understood to include any number, combination of numbers, or sub-range from the group consisting of 1, 2, 3, 4, 5, 6, 7, 8, 9, 10, 11, 12, 13, 14, 15, 16, 17, 18, 19, 20, 21, 22, 23, 24, 25, 26, 27, 28, 29, 31, 32, 33, 34, 35, 36, 37, 38, 39, 40, 41, 42, 43, 44, 45, 46, 47, 48, 49, and 50.

[0101] 6.3. Method of Treatment

[0102] In a first aspect, the current disclosure provides an improved method of treating a patient by non-systemic administration of a recombinant adeno-associated virus (rAAV). The improvement comprises adjunctively administering to the patient via systemic administration a composition comprising at least one antibody or antigen-binding fragment thereof that is capable of neutralizing the non-systemically administered rAAV.

[0103] The antibody or antigen-binding fragments thereof are capable of neutralizing the non-systemically administered rAAV, in particular rAAV that exits the site of administration and enters a systemic compartment. A systemic compartment of the patient can include, but is not limited to, a non-target organ or non-target tissue, or a location within the patient's circulatory system that is outside of the target site.

[0104] The adjunctively administered antibody composition reduces or eliminates transduction of tissues by rAAV that escapes the site of administration and reaches the systemic circulation. In particular, the systemic administration of antibodies or antigen binding fragments reduces non-target (e.g., liver) transduction by rAAV circulating systemically in the patient, reducing or eliminating toxicity (e.g., liver toxicity). The adjunctively administered antibody composition can also reduce or eliminate induction of systemic immune responses to the rAAV.

[0105] In another aspect of the present disclosure, methods of treating a patient are provided. The methods comprise the steps of non-systemically administering to the patient a first pharmaceutical composition comprising a recombinant adeno associated virus (rAAV); and adjunctively administering to the patient via systemic administration a second pharmaceutical composition comprising at least one antibody or antigen-binding fragment thereof that is capable of neutralizing the non-systemically administered rAAV.

[0106] In some embodiments, the patient has never been treated with a therapy comprising rAAV prior to being treated with the method described herein. In some embodiments, the patient has been treated with a therapy comprising rAAV prior to being treated with the method described herein.

[0107] 6.3.1. Recombinant Adeno-Associated Virus (rAAV)

[0108] In the methods described herein, a first composition comprising recombinant AAV (rAAV) is administered non-systemically.

[0109] In some embodiments, the payload of the rAAV recombinant nucleic acid construct is an expressible polynucleotide. In certain embodiments, the expressible polynucleotide encodes a protein (e.g., encoding a therapeutic protein). In certain embodiments, the expressible polynucleotide can be transcribed to provide a guide RNA, a trans-activating CRISPR RNA (tracrRNA), a messenger RNA (mRNA), a microRNA (miRNA), or a shRNA.

[0110] In some embodiments, the payload provides a DNA homology construct for homology directed repair.

[0111] In some embodiments, the rAAV is Zolgensma, Luxturna, other therapeutically developed rAAV drug, or a variation thereof,

[0112] In some embodiments, the rAAV comprises a VP1, VP2, and/or VP3 capsid protein of a naturally occurring AAV serotype. In some embodiments, the rAAV comprises a non-naturally occurring VP1, VP2, and/or VP3 capsid protein. In certain of these embodiments, the non-naturally occurring VP1, VP2, or VP3 capsid protein differs in primary amino acid sequence from naturally occurring capsids. In certain embodiments, the non-naturally occurring capsid includes a biologic or chemical alteration or variation of a naturally occurring AAV capsid protein other than or in addition to a change in the primary amino acid sequence.

[0113] In various embodiments, the capsid proteins are those of an AAV1, AAV2, AAV3B, AAV5, AAV6, AAV8, or AAV9 naturally occurring AAV serotype. In various embodiments, the capsid protein is selected from capsid proteins disclosed in PCT/US2014/060163, U.S. Pat. No. 9,695,220, PCT/US2016/044819, PCT/US2018/032166, PCT/US2019/031851, and PCT/US2019/047546, which are incorporated herein by reference in their entireties.

[0114] In some embodiments, the capsid protein is a capsid protein of AAV9 (Genbank Ace. No: AAS99264.1), AAV1 (Genbank Ace. No: AAD27757.1), AAV2 (Genbank Ace. No: AAC03780.1), AAV3 (Genbank Ace. No: AAC55049.1), AAV3b (Genbank Ace. No: AF028705.1), AAV4 (Genbank Ace. No: AAC58045.1), AAV5 (Genbank Ace. No: AAD13756.1), AAV6 (Genbank Ace. No: AF028704.1), AAV7 (Genbank Ace. No: AAN03855.1), AAV 8 (Genbank Ace. No: AAN03857.1), AAV10 (Genbank Ace. No: AAT46337.1), AAVrh10 (Genbank Ace. No: AY243015.1), AAV11 (Genbank Ace. No: AAT46339.1), AAV12 (Genbank Ace. No: ABI16639.1), AAV13 (Genbank Ace. No: ABZ10812.1), or AAVpol (Genbank Ace. No: FJ688147.1).

[0115] In various embodiments, the AAV capsid protein is a VP1, VP2 or VP3 capsid protein of AAV selected from the group consisting of: AAV2; AAV1; AAV6; AAV3; AAV LK03; AAV7; AAV8; AAV hu.37; AAV rh.10; AAV9; AAV hu.68; AAV10; AAV5; AAV3-3; AAV4-4; AAV1-A; hu.46-A; hu.48-A; hu.44-A; hu.43-A; AAV6-A; hu.34-B; hu.47-B; hu.29-B; rh.63-B; hu.56-B; hu.45-B; rh.57-B; rh. 35-B; rh.58-B; rh.28-B; rh. 51-B; rh.19-B; rh.49-B; rh.52-B; rh.13-B; AAV2-B; rh.20-B; rh.24-B; rh.64-B; hu.27-B; hu.21-B; hu.22-B; hu.23-B; hu.7-C; hu.61-C; rh.56-C; hu.9-C; hu. 54-C; hu.53-C; hu.60-C; hu. 55-C; hu.2-C; hu.1-C; hu.18-C; hu.3-C; hu.25-C; hu.15-C; hu.16-C; hu.11-C; hu.10-C; hu.4-C; rh.54-D; rh.48-D; rh.55-D; rh. 62-D; AAV7-D; rh.52-E; rh. 51-E; hu.39-E; rh.53-E; hu.37-E; rh.43-E; rh.50-E; rh.49-E; rh.61-E; hu.41-E; rh.64-E; hu.42-E; rh.57-E; rh.40-E; hu.67-E; hu.17-E; hu.6-E; hu.66-E; rh.38-E; hu.32-F; AAV9/hu; and hu.31-F; Anc80; Anc81; Anc82; Anc83; Anc84; Anc94; Anc113; Anc126; Anc127; Anc80L27; Anc80L59; Anc80L60; Anc80L62; Anc80L65; Anc80L33; Anc80L36; Anc80L44; Anc80L1; Anc110; and Anc80DI, or a variant of thereof.

[0116] In some embodiments, the capsid protein is a vp1 capsid protein having a sequence selected from: SEQ ID NO: 54 (AAV1 (AAD27757)), SEQ ID NO: 55 (AAV2 (AAC03780)), SEQ ID NO: 56 (AAV3 (AAC55049)), SEQ ID NO: 57 (AAV5 (AAD13756)), SEQ ID NO: 58 (AAV6 (AAB95450)), SEQ ID NO: 59 (AAV7 (AF513851_2)), SEQ ID NO: 60 (AAV8 (AF513852_2)), SEQ ID NO: 61 (AAV9 (AAS99264)), SEQ ID NO: 62 (AAV10 (AAT46337)), SEQ ID NO: 63 (AAV hu.68), SEQ ID NO: 64 (AAV LK03), SEQ ID NO: 65 (AAV hu.1 (AAS99260)), SEQ ID NO: 66 (AAV hu.2 (AAS99270)), SEQ ID NO: 67 (AAV hu.3 (AAS99280)), SEQ ID NO: 68 (AAV hu.4 (AAS99287)), SEQ ID NO: 69 (AAV hu.6 (AAS99306)), SEQ ID NO: 70 (AAV hu.7 (AAS99313)), SEQ ID NO: 71 (AAV hu.9 (AAS99314)), SEQ ID NO: 72 (AAV hu.10 (AAS99261)), SEQ ID NO: 73 (AAV hu.11 (AAS99262)), SEQ ID NO: 74 (AAV hu.15 (AAS99265)), SEQ ID NO: 75 (AAV hu.16 (AAS99266)), SEQ ID NO: 76 (AAV hu.17 (AAS99267)), SEQ ID NO: 77 (AAV hu.18 (AAS99268)), SEQ ID NO: 78 (AAV hu.20 (AAS99271)), SEQ ID NO: 79 (AAV hu.21 (AAS99272)), SEQ ID NO: 80 (AAV hu.22 (AAS99273)), SEQ ID NO: 81 (AAV hu.23 (AAS99274)), SEQ ID NO: 82 (AAV hu.25 (AAS99276)), SEQ ID NO: 83 (AAV hu.27 (AAS99277)), SEQ ID NO: 84 (AAV hu.28 (AAS99278)), SEQ ID NO: 85 (AAV hu.29 (AAS99279)), SEQ ID NO: 86 (AAV hu.31 (AAS99281)), SEQ ID NO: 87 (AAV hu.32 (AAS99282)), SEQ ID NO: 88 (AAV hu.34 (AAS99283)), SEQ ID NO: 89 (AAVhu.37 (AAS99285)), SEQ ID NO: 90 (AAV hu.39 (AAS99286)), SEQ ID NO: 91 (AAV hu.41 (AAS99289)), SEQ ID NO: 92 (AAV hu.42 (AAS99290)), SEQ ID NO: 93 (AAV hu.43 (AAS99291)), SEQ ID NO: 94 (AAV hu.44 (AAS99292)), SEQ ID NO: 95 (AAV hu.45 (AAS99293)), SEQ ID NO: 96 (AAV hu.46 (AAS99294)), SEQ ID NO: 97 (AAV hu.47 (AAS99295)), SEQ ID NO: 98 (AAV hu.48 (AAS99296)), SEQ ID NO: 99 (AAV hu.51 (AAS99298)), SEQ ID NO: 100 (AAV hu.52 (AAS99299)), SEQ ID NO: 101 (AAV hu.53 (AAS99300)), SEQ ID NO: 102 (AAV hu.54 (AAS99301)), SEQ ID NO: 103 (AAV hu.55 (AAS99302)), SEQ ID NO: 104 (AAV hu.56 (AAS99303)), SEQ ID NO: 105 (AAV hu.57 (AAS99304)), SEQ ID NO: 106 (AAV hu.60 (AAS99307)), SEQ ID NO: 107 (AAV hu.61 (AAS99308)), SEQ ID NO: 108 (AAV hu.63 (AAS99309)), SEQ ID NO: 109 (AAV hu.66 (AAS99311)), SEQ ID NO: 110 (AAV hu.67 (AAS99312)), SEQ ID NO: 111 (AAV rh.10 (AA088201)), SEQ ID NO: 112 (AAV rh.13 (AA088199)), SEQ ID NO: 113 (AAV rh.19 (AA088194)), SEQ ID NO: 114 (AAV rh.22 (AA088192)), SEQ ID NO: 115 (AAV rh.23 (AA088191)), SEQ ID NO: 116 (AAV rh.24 (AA088190)), SEQ ID NO: 117 (AAV rh.35 (AA088186)), SEQ ID NO: 118 (AAV rh.43 (AAS99245)), SEQ ID NO: 119 (AAV rh.48 (AAS99246)), SEQ ID NO: 120 (AAV rh.49 (AAS99247)), SEQ ID NO: 121 (AAV rh.50 (AAS99248)), SEQ ID NO: 122 (AAV rh.51 (AAS99249)), SEQ ID NO: 123 (AAV rh.52 (AAS99250)), SEQ ID NO: 124 (AAV rh.53 (AAS99251)), SEQ ID NO: 125 (AAV rh.54 (AAS99252)), SEQ ID NO: 126 (AAV rh.55 (AAS99253)), SEQ ID NO: 127 (AAV rh.57 (AAS99254)), SEQ ID NO: 128 (AAV rh.58 (AAS99255)), SEQ ID NO: 129 (AAV rh.62 (AAS99258)), SEQ ID NO: 130 (AAV rh.64 (AAS99259)), SEQ ID NO: 131 (AAV rh.56 (JA400164)), SEQ ID NO: 143 (Anc80L1), SEQ ID NO: 144 (Anc80L27), SEQ ID NO: 145 (Anc80L33), SEQ ID NO: 146 (Anc80L36), SEQ ID NO: 147 (Anc80L44), SEQ ID NO: 148 (Anc80L59), SEQ ID NO: 149 (Anc80L60), SEQ ID NO: 150 (Anc80L62), SEQ ID NO: 151 (Anc82DI), and SEQ ID NO: 152 (AAV rh.74).

[0117] In some embodiments, the protein is a vp1 capsid protein having a sequence selected from: SEQ ID NO: 132 (Anc80), SEQ ID NO: 133 (Anc81 (AKU89596)), SEQ ID NO: 134 (Anc82 (AKU89597)), SEQ ID NO: 135 (Anc83 (AKU89598)), SEQ ID NO: 136 (Anc84 (AKU89599)), SEQ ID NO: 137 (Anc94) SEQ ID NO: 138 (Anc110 (AKU89600)), SEQ ID NO: 139 (Anc113 (AKU89601)), SEQ ID NO: 140 (Anc126 (AKU89602)), SEQ ID NO: 141 (Anc127 (AKU89603)), and SEQ ID NO: 142 (Anc80L65 (AKU89595)).

[0118] The AAV capsid protein can be a vp2 or vp3 protein having a part of one of the vp1 sequences. For example, vp2 protein can have a sequence corresponding to amino acids 138 to 736 of AAV9 vp1 and vp3 protein can have a sequence corresponding to amino acids 138 to 736 of AAV9 vp1 protein. When a SEQ ID NO for a library sequence is used in this disclosure, it refers to a sequence of any one member of the library. In some embodiments, the AAV capsid protein is a variant of the vp1, vp2, or vp3 protein described herein.

[0119] In some embodiments, the rAAV is administered in a first composition. The first pharmaceutical composition comprises a therapeutically effective amount of rAAV and a physiologically compatible carrier. Suitable carriers include saline, artificial cerebrospinal fluid, and other carriers designed for local or regional administration.

[0120] The dose of a viral vector administered to a subject will depend primarily on factors such as the clinical condition being treated, the route of administration, and the age, weight, and health of the subject. For example, a therapeutically effective dosage of a viral vector to be administered to a human subject generally is in the range of from about 0.1 ml to about 10 ml of a solution containing the viral vector. The therapeutically effective dosage can comprise about 1×10¹ to 2×10¹⁶ genome copies (GCs) of viruses (e.g., about 1×10¹ to 1×10¹⁶; about 1×10³ to 1×10¹⁵; about 1×10³ to 1×10¹⁴ GCs, etc.). In some embodiments, 1×10⁹ to 1×10¹⁵ genome copies (GCs) of viruses are administered per patient. In some embodiments, 1×10¹⁰ to 1×10¹⁶ genome copies (GCs) of viruses are administered per patient. In some embodiments, 1×10¹² to 1×10¹⁶ genome copies (GCs) of viruses are administered per patient. In some embodiments, 1×10¹² to 1×10¹⁴ genome copies (GCs) of viruses are administered per patient. In some embodiments, 1×10¹³ to 1×10¹⁴ genome copies (GCs) of viruses are administered per patient. In some embodiments, 1×10¹³ to 1×10¹⁸ genome copies (GCs) of viruses are administered per patient. In some embodiments, 1×10¹³ to 1×10²⁰ genome copies (GCs) of viruses are administered per patient.

[0121] In certain embodiments, a therapeutically effective dosage of a viral vector to be administered to a human subject generally is in the range of from about 0.1 ml to about 10 ml of a solution containing about 1×10¹ to 2×10¹⁶ genome copies (GCs) of viruses (e.g., about 1×10¹ to 1×10¹⁶; about 1×10³ to 1×10¹⁵; about 1×10³ to 1×10¹⁴ GCs, etc.).

[0122] Transduction and/or expression of a transgene can be monitored at various time points following administration by DNA, RNA, or protein assays. In some instances, the levels of expression of the transgene can be monitored to determine the frequency and/or amount of dosage. Dosage regimens similar to or lower than those described for therapeutic purposes can be utilized for immunization.

[0123] 6.3.2. AAV-Neutralizing Antibodies

[0124] The method provided in the present disclosure comprises the step of systemically administering a composition comprising at least one antibody, or an antigen-binding fragment thereof, that is capable of neutralizing the non-systemically administered rAAV.

[0125] In various embodiments, the non-systemically administered rAAV includes a capsid protein of an AAV as described in section 5.3.1. and the composition comprising the at least one antibody or antigen binding fragment that is capable of neutralizing an AAV as described in section 5.3.1.

[0126] In some embodiments, the composition comprising at least one antibody includes at least two antibodies, at least three antibodies, at least four antibodies, at least five antibodies, at least six antibodies, at least seven antibodies, at least eight antibodies, at least nine antibodies, or at least ten antibodies. In various embodiments, the composition comprises at least 10 antibodies, at least 50 antibodies, at least 100 antibodies, at least 150 antibodies, at least 200 antibodies, at least 250 antibodies, at least 300 antibodies, at least 350 antibodies, at least 400 antibodies, at least 450 antibodies, at least 500 antibodies, at least 750 antibodies, at least 1000 antibodies, at least 1500 antibodies, at least 2000 antibodies, at least 2500 antibodies, at least 3000 antibodies, at least 3500 antibodies, at least 4000 antibodies, at least 4500 antibodies, at least 5000 antibodies, at least 5500 antibodies, at least 6000 antibodies, at least 6500 antibodies, at least 7000 antibodies, at least 7500 antibodies, at least 8000 antibodies, at least 8500 antibodies, at least 9000 antibodies, at least 9500 antibodies, or at least 10,000 antibodies. In various embodiments, the composition comprises at least 500 antibodies, at least 1000 antibodies, at least 5000 antibodies, at least 10,000 antibodies, at least 15,000 antibodies, at least 20,000 antibodies, at least 25,000 antibodies, at least 30,000 antibodies, at least 35,000 antibodies, at least 40,000 antibodies, at least 45,000 antibodies, at least 50,000 antibodies, at least 55,000 antibodies, at least 60,000 antibodies, at least 65,000 antibodies, or at least 70,000 antibodies.

[0127] In typical embodiments, the composition comprises a polyclonal antibody. In certain embodiments, the composition comprises polyclonal antibodies.

[0128] In some embodiments, the polyclonal antibodies are human antibodies. In typical embodiments, the human antibodies are allogeneic to the recipient. In some embodiments, the polyclonal antibodies are xenogeneic, but have been engineered to reduce, mitigate, or avoid recognition as a xeno-antibody. In certain of these embodiments, the antibodies are humanized antibodies.

[0129] In some embodiments, the composition comprises IgG (e.g., IgG1, IgG2, IgG3, IgG4) antibodies. In some embodiments, the composition comprises IgA antibodies.

[0130] In certain embodiments, immunoglobulin from pooled human plasma is used. In these embodiments, the immunoglobulin can be pooled from any number of individuals (e.g., donors), including 10 or more individuals, 100 or more individuals, 1000 or more individuals, or more. In certain embodiments, the composition includes a mixture of polyclonal antibodies obtained from at least 100 donors. In certain embodiments, the composition includes a mixture of polyclonal antibodies obtained from at least 500 donors, at least 1000 donors, at least 5000 donors, at least 10,000 donors, at least 15,000 donors, at least donors, at least 25,000 donors, at least 30,000 donors, at least 35,000 donors, at least donors, at least 45,000 donors, at least 50,000 donors, at least 55,000 donors, at least donors, at least 65,000 donors, or at least 70,000 donors.

[0131] In some embodiments, the antibodies are isolated or purified from serum prior to use. The purification can be conducted before or after pooling the antibodies from different individuals.

[0132] In some embodiments, the pooled immunoglobulin has been determined prior to administration to contain neutralizing antibodies to one or more rAAV capsid serotypes. In some embodiments, the composition comprises within the pool immunoglobulins from an individual or individuals previously determined to contain at least one antibody capable of neutralizing a specific serotype of AAV or an rAAV containing a specific capsid protein.

[0133] In some embodiments, the polyclonal composition comprises at least one species of recombinant antibody. In certain embodiments, the composition includes a mixture of recombinant antibodies. In certain embodiments, the mixture of recombinant antibodies includes 2 or more, 3 or more, 4 or more, 5 or more, 6 or more, 7 or more, 8 or more, 9 or more, or 10 or more, 100 or more, 1000 or more, 10,000 or more, or 100, 000 or more species of recombinant antibodies.

[0134] In some embodiments, a mixture of recombinant polyclonal antibodies comprises antibodies generated from a library of recombinant constructs containing coding sequences of two or more monoclonal antibodies or antigen binding fragment. In some embodiments, recombinant polyclonal antibodies are generated by mixing and combining antibodies generated from more than one recombinant construct, each encoding an antibody or antigen binding fragment. In some embodiments, recombinant polyclonal antibodies recognize and bind to different epitopes of a single antigen. In some embodiments, recombinant polyclonal antibodies recognize and bind to different antigens.

[0135] In certain embodiments, the at least one antibody is a monoclonal antibody. In these latter embodiments, the binding specificity of the monoclonal antibodies is chosen based on its ability to neutralize the administered rAAV.

[0136] In some embodiments, the at least one antibody is a monoclonal antibody of a defined sub-class (e.g., IgG1, IgG2, IgG3, IgG4, IgA1, or IgA2). If combinations of antibodies are used, the antibodies can be from the same subclass or from different subclasses. For example, the antibodies can be IgG1 antibodies. Various combinations of different subclasses, in different relative proportions, can be obtained by those of skill in the art.

[0137] In some embodiments, the antibody is a monoclonal antibody against an AAV or rAAV containing a capsid protein of an AAV selected from: AAV2; AAV1; AAV6; AAV3; AAV LK03; AAV7; AAV8; AAV hu.37; AAV rh.10; AAV9; AAV hu.68; AAV10; AAV5; AAV3-3; AAV4-4; AAV1-A; hu.46-A; hu.48-A; hu.44-A; hu.43-A; AAV6-A; hu.34-B; hu.47-B; hu.29-B; rh.63-B; hu.56-B; hu.45-B; rh.57-B; rh.35-B; rh.58-B; rh.28-B; rh.51-B; rh.19-B; rh.49-B; rh.52-B; rh.13-B; AAV2-B; rh.20-B; rh.24-B; rh.64-B; hu.27-B; hu.21-B; hu.22-B; hu.23-B; hu.7-C; hu.61-C; rh.56-C; hu. 9-C; hu.54-C; hu.53-C; hu.60-C; hu.55-C; hu.2-C; hu.1-C; hu.18-C; hu.3-C; hu.25-C; hu.15-C; hu.16-C; hu.11-C; hu.10-C; hu.4-C; rh.54-D; rh.48-D; rh.55-D; rh.62-D; AAV7-D; rh.52-E; rh.51-E; hu.39-E; rh.53-E; hu.37-E; rh.43-E; rh.50-E; rh.49-E; rh.61-E; hu.41-E; rh.64-E; hu.42-E; rh.57-E; rh.40-E; hu.67-E; hu.17-E; hu.6-E; hu.66-E; rh.38-E; hu.32-F; AAV9/hu; hu.31-F; Anc80; Anc81; Anc82; Anc83; Anc84; Anc94; Anc113; Anc126; Anc127; Anc80L27; Anc80L59; Anc80L60; Anc80L62; Anc80L65; Anc80L33; Anc80L36; Anc80L44; Anc80L1; Anc110; and Anc80DI.

[0138] In various embodiments, the antibody is a monoclonal antibody selected from: anti-AAV2 antibody; anti-AAV1 antibody; anti-AAV6 antibody; anti-AAV3 antibody; anti-AAV LK03 antibody; anti-AAV7 antibody; anti-AAV8 antibody; anti-AAV hu.37 antibody; anti-AAV rh.10 antibody; anti-AAV9 antibody; anti-AAV hu.68 antibody; anti-AAV10 antibody; anti-AAV5 antibody; anti-AAV3-3 antibody; anti-AAV4-4 antibody; anti-AAV1-A antibody; anti-hu.46-A antibody; anti-hu.48-A antibody; anti-hu.44-A antibody; anti-hu.43-A antibody; anti-AAV6-A antibody; anti-hu.34-B antibody; anti-hu.47-B antibody; anti-hu.29-B antibody; anti-rh.63-B antibody; anti-hu.56-B antibody; anti-hu.45-B antibody; anti-rh.57-B antibody; anti-rh.35-B antibody; anti-rh.58-B antibody; anti-rh.28-B antibody; anti-rh.51-B antibody; anti-rh.19-B antibody; anti-rh.49-B antibody; anti-rh.52-B antibody; anti-rh.13-B antibody; anti-AAV2-B antibody; anti-rh.20-B antibody; anti-rh.24-B antibody; anti-rh.64-B antibody; anti-hu.27-B antibody; anti-hu.21-B antibody; anti-hu.22-B antibody; anti-hu.23-B antibody; anti-hu.7-C antibody; anti-hu.61-C antibody; anti-rh.56-C antibody; anti-hu. 9-C antibody; anti-hu.54-C antibody; anti-hu.53-C antibody; anti-hu.60-C antibody; anti-hu.55-C antibody; anti-hu.2-C antibody; anti-hu.1-C antibody; anti-hu.18-C antibody; anti-hu.3-C antibody; anti-hu.25-C antibody; anti-hu.15-C antibody; anti-hu.16-C antibody; anti-hu.11-C antibody; anti-hu.10-C antibody; anti-hu.4-C antibody; anti-rh.54-D antibody; anti-rh.48-D antibody; anti-rh.55-D antibody; anti-rh.62-D antibody; anti-AAV7-D antibody; anti-rh.52-E antibody; anti-rh.51-E antibody; anti-hu.39-E antibody; anti-rh.53-E antibody; anti-hu.37-E antibody; anti-rh.43-E antibody; anti-rh.50-E antibody; anti-rh.49-E antibody; anti-rh.61-E antibody; anti-hu.41-E antibody; anti-rh.64-E antibody; anti-hu.42-E antibody; anti-rh.57-E antibody; anti-rh.40-E antibody; anti-hu.67-E antibody; anti-hu.17-E antibody; anti-hu.6-E antibody; anti-hu.66-E antibody; anti-rh.38-E antibody; anti-hu.32-F antibody; anti-AAV9/hu antibody; anti-hu.31-F antibody; anti-Anc80 antibody; anti-Anc81 antibody; anti-Anc82 antibody; anti-Anc83 antibody; anti-Anc84 antibody; anti-Anc94 antibody; anti-Anc113 antibody; anti-Anc126 antibody; anti-Anc127 antibody; anti-Anc80L27 antibody; anti-Anc80L59 antibody; anti-Anc80L60 antibody; anti-Anc80L62 antibody; anti-Anc80L65 antibody; anti-Anc80L33 antibody; anti-Anc80L36 antibody; anti-Anc80L44 antibody; anti-Anc80L1 antibody; anti-Anc110 antibody; and anti-Anc80DI antibody.

[0139] In some embodiments, the composition comprises at least one bispecific antibody. In certain embodiments, the bispecific antibody has a binding specificity for at least two different epitopes, at least one of which is an epitope of a rAAV.

[0140] In some embodiments, the antibody is a single-domain antibody (dAb). In some embodiments, the antibody is a diabody (db). In some embodiments, the antibody is a nanobody. In some embodiments, the antibody is a unibody, or a diabody.

[0141] In some embodiments, the antibody is administered in a second pharmaceutical composition. In some embodiments, the second composition comprises polyclonal antibodies purified from human serum or generated from recombinant constructs.

[0142] 6.3.2.1. IVIG

[0143] In currently preferred embodiments, the composition comprising neutralizing antibodies is intravenous immunoglobulin (IVIG). In certain embodiments, the IVIG is selected from: Gammagard™ Liquid® (Baxter HealthCare Corp), Gammagard™ S/D, Gammaplex™, Bivigam™, Carimune™ NF, Gamunex-C, Gammaked™, Flebogamma™ DIF, Octagam™, and Privigen™.

[0144] In some embodiments, recombinant IVIG (rIVIG) generated from recombinant constructs is used. In these embodiments, IVIG is produced in recombinant cells rather than extracted from donor plasma. In these embodiments, primary B cells are collected from thousands of human donors to generate a library of constructs or cell lines expressing rIVIG. In some embodiments of the invention, the library of protein expression constructs is then introduced into a population of cells to produce a library of engineered cells that express a library of hundreds, thousands, or millions of antibody proteins. In some embodiments, these antibody proteins are substantially equivalent to the antibodies produced by the original primary B cells.

[0145] In some embodiments, massively parallel DNA sequencing is used to determine the diversity of the B cells, the library of protein expression constructs, and/or the engineered host cells. Methods of making rIVIG can be found in US PreGrant Publication No. 2016/0362470, which is hereby incorporated by reference in its entirety.

[0146] In some embodiments, the IVIG or rIVIG is administered in a second pharmaceutical composition.

[0147] 6.3.2.2. AAV-Neutralizing Antigen Binding Fragments

[0148] In some embodiments, the second composition comprises AAV-neutralizing antigen-binding fragments.

[0149] In certain embodiments, the second composition comprises a mixture of AAV-neutralizing antigen-binding fragments. In certain embodiments, the mixture comprises 1 or more, 2 or more, 3 or more, 4 or more, 5 or more, 6 or more, 7 or more, 8 or more, 9 or more, or more, 11 or more, 12 or more, 13 or more, 14 or more, 15 or more, 16 or more, 17 or more, 18 or more, 19 or more, 20 or more, 100 or more, 1000 or more, 10,000 or more, or 100,000 or more AAV-neutralizing antigen-binding fragments.

[0150] In certain embodiments, the antigen-binding fragment is selected from: a single chain Fv (scFv), a Fab, a (Fab′)₂, and an (ScFv)₂.

[0151] In certain embodiments, the antigen-binding fragment is an scFv. In certain embodiments, the antigen-binding fragment is an (ScFv)₂.

[0152] In certain embodiments, the antigen-binding fragment is a Fab. In certain embodiments, the antigen-binding fragment is a (Fab′)₂.

[0153] In some embodiments, an antibody or antigen-binding fragment thereof is administered in a second composition. In some embodiments, the second composition is a second pharmaceutical composition. In certain embodiments, the second pharmaceutical composition comprises an antibody or antigen-binding fragment thereof that is capable of neutralizing the non-systemically administered rAAV and a pharmaceutically acceptable carrier.

[0154] In some embodiments, the second pharmaceutical composition comprises at least 10, at least 100, at least 1000, at least 10,000 or at least 100,000 antigen-binding fragments. In some embodiments, the second pharmaceutical composition comprises at least 10, at least 100, at least 1000, at least 10,000 or at least 100,000 antigen-binding fragments.

[0155] 6.3.3. Routes and Schedule of Administration

[0156] The present disclosure provides a method comprising administering a first pharmaceutical composition comprising a rAAV, and adjunctively administering a second pharmaceutical composition comprising at least one antibody or antigen-binding fragment thereof that is capable of neutralizing the rAAV. The first pharmaceutical composition comprising rAAV is administered non-systemically. The second pharmaceutical composition comprising at least one antibody or antigen-binding fragment thereof that is capable of neutralizing the non-systemically administered rAAV is administered systemically.

[0157] In some embodiments, the second pharmaceutical composition comprising the antibody or antigen-binding fragment thereof is administered before administration of the first pharmaceutical composition comprising the rAAV to the patient.

[0158] In certain embodiments, the second pharmaceutical composition is administered at least 30 minutes before, at least 1 hour before, at least 2 hours before, at least 4 hours before, at least 6 hours before, at least 8 hours before, at least 10 hours before, at least 12 hours before, at least 14 hours before, at least 16 hours before, at least 18 hours before, at least 20 hours before, at least 22 hours before, or at least 24 hours before, administration of the first pharmaceutical composition to the patient. In certain embodiment, the second pharmaceutical composition is administered at least 1 day before, 2 days before, 3 days before, 4 days before, 5 days before, 6 days before, or 7 days before administration of the first pharmaceutical composition to the patient.

[0159] In certain embodiments, the second pharmaceutical composition is administered at least one day before, at least one week before, or at least two weeks before administration of the first pharmaceutical composition to the patient. In some embodiments, the second pharmaceutical composition comprising the antibody or antigen-binding fragment thereof is administered after administration of the first pharmaceutical composition comprising the rAAV to the patient.

[0160] In certain embodiments, the second pharmaceutical composition is administered at least 30 minutes after, at least 1 hour after, at least 2 hours after, at least 4 hours after, at least 6 hours after, at least 8 hours after, at least 10 hours after, at least 12 hours after, at least 14 hours after, at least 16 hours after, at least 18 hours after, at least 20 hours after, at least 22 hours after, or at least 24 hours after, administration of the first pharmaceutical composition to the patient. In certain embodiments, the second pharmaceutical composition is administered at 30 minutes after, 1 hour after, 2 hours after, 4 hours after, 6 hours after, 8 hours after, 10 hours after, 12 hours after, 14 hours after, 16 hours after, 18 hours after, 20 hours after, 22 hours after, or 24 hours after, administration of the first pharmaceutical composition to the patient. In certain embodiments, the second pharmaceutical composition is administered at least one day after, at least one week after, at least two weeks after, or at least one month after administration of the first pharmaceutical composition to the patient. In certain embodiments, the second pharmaceutical composition is administered at least one day after, at least two days after, at least three days after, at least four days after, at least five days after, at least six days after, or at least seven days after administration of the first pharmaceutical composition to the patient.

[0161] In some embodiments, the first pharmaceutical composition comprising the rAAV and the second pharmaceutical composition comprising the antibody or antigen-binding fragment thereof are administered on the same day.

[0162] In some embodiments, the second pharmaceutical composition comprising the antibody or antigen-binding fragment thereof is administered at a sufficient amount to alter biodistribution of the rAAV following administration to the patient. Administration of the second pharmaceutical composition reduces rAAV infection of non-target tissues, cells, and/or organs. In certain embodiments, administration of the second pharmaceutical composition reduces rAAV infection of liver cells, skeletal muscle cells, myocardial cells, lung tissue, or other non-target organ cells outside of the non-systemic compartment into which the rAAV was administered. In certain embodiments, the second pharmaceutical composition is administered in a sufficient amount to reduce liver toxicity or other non-target organ toxicity outside of the non-systemic compartment of the rAAV following administration to the patient. In certain embodiments, the second pharmaceutical composition is administered in a sufficient amount to reduce toxicity in dorsal root ganglion (DRG). In some embodiments, the second pharmaceutical composition is administered at a sufficient amount to reduce systemic toxicity of the rAAV following administration to the patient.

[0163] In some embodiments, the method further comprises administering an additional pharmaceutical composition comprising an rAAV. In some embodiments, the additional pharmaceutical composition is administered prior to administration of the first pharmaceutical composition and the second pharmaceutical composition. In some embodiments, the additional pharmaceutical composition is administered after administration of the first pharmaceutical composition and the second pharmaceutical composition. In some embodiments, the additional pharmaceutical composition is administered with a pharmaceutical composition comprising at least one antibody or antigen-binding fragment thereof.

[0164] Accordingly, also provided herein are methods comprising administering a third pharmaceutical composition comprising a rAAV, and adjunctively administering a fourth pharmaceutical composition comprising at least one antibody or antigen-binding fragment thereof that is capable of neutralizing the rAAV. The rAAV in the third pharmaceutical composition can be same as or different from the rAAV in the first pharmaceutical composition. In some embodiments, the third pharmaceutical composition is identical to the first pharmaceutical composition. In some embodiments, the third pharmaceutical composition is different from the first pharmaceutical composition. In some embodiments, the fourth pharmaceutical composition is identical to the second pharmaceutical composition. In some embodiments, the fourth pharmaceutical composition is different from the second pharmaceutical composition.

[0165] In certain embodiments, a patient having received a first dose of the first pharmaceutical composition comprising a rAAV may need a second dose (a third dose, a fourth dose, or a fifth or more doses) of the first pharmaceutical composition so that a therapeutically effective amount of the rAAV is administered to the patient. In such embodiments, administering the second pharmaceutical composition prior to, contemporaneously with (e.g., on the same day), or after the second dose of the first pharmaceutical compound enables a therapeutically effective amount of the first pharmaceutical composition to be delivered to the patient.

[0166] In some embodiments, the second dose of the first pharmaceutical composition is administered to the patient at a lower dose than the first dose of the first pharmaceutical composition administered to the patient. In some embodiments, the second dose of the first pharmaceutical composition is administered to the patient at a higher dose than the first dose of the pharmaceutical composition administered to the patient. In some embodiments, the second dose of the first pharmaceutical composition is administered to the patient at the same dose as the first dose of the pharmaceutical composition administered to the patient.

[0167] In some embodiments, the second dose of the second pharmaceutical composition is administered to the patient at a lower dose than the first dose of the second pharmaceutical composition administered to the patient. In some embodiments, the second dose of the second pharmaceutical composition is administered to the patient at a higher dose than the first dose of the second pharmaceutical composition administered to the patient. In some embodiments, the second dose of the second pharmaceutical composition is administered to the patient at the same dose as the first dose of the second pharmaceutical composition administered to the patient.

[0168] In some embodiments, the first or second dose of the second pharmaceutical composition is administered before administration (e.g., any of the exemplary timings described herein) of the first or second dose of the first pharmaceutical composition to the patient. In some embodiments, the first or second dose of the second pharmaceutical composition is administered after administration (e.g., any of the exemplary timings described herein) of the first or second dose of the first pharmaceutical composition to the patient. In some embodiments, the first or second dose of the first pharmaceutical composition and the second dose of the second pharmaceutical composition are administered to the patient on the same day.

[0169] Also provided herein are methods comprising administering a second, third, fourth, fifth, sixth, seventh, eighth, ninth, tenth, or more doses of a first pharmaceutical composition comprising a rAAV and adjunctively administering a second, third, fourth, fifth, sixth, seventh, eighth, ninth, tenth, or more doses of a second pharmaceutical composition comprising at least one antibody or antigen-binding fragment thereof that is capable of neutralizing the rAAV.

[0170] 6.3.3.1. Non-Systemic Administration of rAAV

[0171] As described herein, rAAV or a first pharmaceutical composition comprising rAAV is administered via a non-systemic route of administration to the patient. In some embodiments, rAAV or a composition comprising the rAAV is administered to the brain, spinal cord, muscle, eye, ear, or any other organ by local or regional delivery.

[0172] In some embodiments, rAAV or the first pharmaceutical composition is non-systemically administered to the central nervous system by intrathecal administration, intracerebroventricular administration, or intracisternamagna administration. In certain embodiments, rAAV or the first pharmaceutical composition comprising rAAV is administered to the brain, spinal cord, retina, olfactory epithelium, eye, or ear. In certain embodiments, the target organ is the brain.

[0173] In certain embodiments, rAAV or the first pharmaceutical composition is administered to a target tissue selected from the hippocampus, cortex, thalamus (including the central thalamus), sensory cortex, ventral tegmental area (VTA), prefrontal cortex (PFC), nucleus accumbens (NAc), amygdala, substantia nigra, ventral pallidum, global pallidus, dorsal striatum, ventral striatum, subthalamic nucleus, dentate gyrus, cingulate gyms, entorhinal cortex, olfactory cortex, primary motor cortex, and the cerebellum. In certain embodiments, the target tissue in the brain is selected from the group consisting of: hippocampus, cortex, amygdala, and the basal ganglion.

[0174] In certain embodiments, the target organ is the eye.

[0175] In certain embodiments, the target organ is the muscle.

[0176] In some embodiments, rAAV or the first pharmaceutical composition is administered locally (e.g., non-systemic). In certain embodiments, rAAV or the first pharmaceutical composition is administered by intrathecal injection or infusion, intraocular injection, intravitreal injection or infusion, inner ear injection or infusion, intracerebroventricular injection or infusion, intracisternal magna injection (ICM) or infusion, intramuscular injection or infusion, subretinal injection or infusion, or by other routes of non-systemic administration. In certain embodiments, the first pharmaceutical composition is administered by intraarticular injection or infusion, intracardiac injection or infusion, intradermal or intracutaneous injection, or intrathecal injection or infusion.

[0177] In certain embodiments, the first pharmaceutical composition is administered by intrathecal injection. In certain embodiments, the first pharmaceutical composition is administered by intrathecal infusion.

[0178] In certain embodiments, the first pharmaceutical composition is administered by intraocular injection. In certain embodiments, the first pharmaceutical composition is administered by intraocular infusion.

[0179] In certain embodiments, the first pharmaceutical composition is administered by intravitreal injection. In certain embodiments, the first pharmaceutical composition is administered by intravitreal infusion.

[0180] In certain embodiments, the first pharmaceutical composition is administered by intracerebroventricular injection. In certain embodiments, the first pharmaceutical composition is administered by intracerebroventricular infusion.

[0181] In certain embodiments, the first pharmaceutical composition is administered by subretinal injection or infusion.

[0182] In certain embodiments, the first pharmaceutical composition is administered by intracisternal magna injection. In certain embodiments, the first pharmaceutical composition is administered by intracisternal magna infusion.

[0183] In certain embodiments, the first pharmaceutical composition is administered by inner ear injection. In certain embodiments, the first pharmaceutical composition is administered by inner ear infusion.

[0184] In certain embodiments, the first pharmaceutical composition is administered by intramuscular injection. In certain embodiments, the first pharmaceutical composition is administered by intramuscular infusion.

[0185] 6.3.3.2. Systemic Administration of Neutralizing Antibodies

[0186] In the methods described herein, the second pharmaceutical composition is administered via systemic route of administration. In some embodiments, the second pharmaceutical composition is administered via intramuscular injection, intraosseous injection, intratracheal injection, intravenous injection, or subcutaneous injection. In certain embodiments, systemic route of administration is intravenous injection or infusion. In some embodiments, systemic route of administration is, but is not limited to, or transmucosal, sublingual, or rectal administration.

[0187] The second pharmaceutical composition is administered systemically in the present methods for the purpose of neutralizing and/or clearing rAAVs that escape the target tissues and organs and are circulating systemically within the patient. For example, the rAAV can escape to a systemic compartment that includes non-target tissues and organs or a location within the patient outside of the central nervous system.

[0188] In some embodiments, neutralizing antibodies or fragments thereof are administered at a dosage ranging from 1-2000 mg/kg patient weight. In certain embodiments, the neutralizing antibodies or fragments thereof are administered at a dose ranging from 1-2 mg/kg, 1-3 mg/kg, 1-5 mg/kg, 1-6 mg/kg, 1-7 mg/kg, 1-8 mg/kg, or 1-9 mg/kg, patient weight. In certain embodiments, the neutralizing antibodies or fragments thereof are administered at a dose of at least 1 mg/kg, at least 2 mg/kg, at least 3 mg/kg, at least 4 mg/kg, at least 5 mg/kg, at least 6 mg/kg, at least 7 mg/kg, at least 8 mg/kg, at least 9 mg/kg, at least mg/kg, at least 11 mg/kg, at least 12 mg/kg, at least 13 mg/kg, at least 14 mg/kg, at least mg/kg, at least 16 mg/kg, at least 17 mg/kg, at least 18 mg/kg, at least 19 mg/kg, or at least 20 mg/kg, patient weight.

[0189] In some embodiments, IVIG is administered at a dose ranging from 1-2000 mg/kg patient weight. In some embodiments, IVIG is administered at a dose ranging from 1-200 mg/kg patient weight. In some embodiments, IVIG is administered at a dose ranging from 1-100 mg/kg patient weight. In some embodiments, IVIG is administered at a dose ranging from 1-50 mg/kg patient weight. In some embodiments, IVIG is administered at a dose ranging from 1-10 mg/kg patient weight. In some embodiments, IVIG is administered at a dose ranging from 1-2 mg/kg patient weight. In some embodiments, IVIG is administered at a dose ranging from 1-10 mg/ml. In some embodiments, IVIG is administered at a dose ranging from 1-4 mg/ml.

[0190] In certain embodiments, the neutralizing antibodies or fragments thereof are administered at a dose of at least 20 mg/kg, at least 30 mg/kg, at least 40 mg/kg, at least 50 mg/kg, at least 60 mg/kg, at least 70 kg/mg, at least 80 kg/mg, at least 90 mg/kg, or at least 100 mg/kg, patient weight. In certain embodiments, the neutralizing antibodies or fragments thereof are administered at a dose of at least 110 mg/kg, at least 125 mg/kg, at least 150 mg/kg, at least 175 mg/kg, at least 200 mg/kg, at least 225 mg/kg, at least 250 mg/kg, at least 275 mg/kg, at least 300 mg/kg, at least 325 mg/kg, at least 350 mg/kg, at least 375 mg/kg, at least 400 mg/kg, at least 425 mg/kg, at least 450 mg/kg, at least 475 mg/kg, at least 500 mg/kg, at least 525 mg/kg, at least 550 mg/kg, at least 575 mg/kg, at least 600 mg/kg, at least 625 mg/kg, at least 650 mg/kg, at least 675 mg/kg, at least 700 mg/kg, at least 725 mg/kg, at least 50 mg/kg, at least 775 mg/kg, at least 800 mg/kg, at least 835 mg/kg, at least 850 mg/kg, at least 875 mg/kg, at least 900 mg/kg, at least 925 mg/kg, at least 950 mg/kg, at least 950 mg/kg, at least 975 mg/kg, or at least 1000 mg/kg, patient weight.

[0191] In certain embodiments, the neutralizing antibodies or fragments thereof are administered at a dose of at least 1100 mg/kg, at least 1200 mg/kg, at least 1300 mg/kg, at least 1400 mg/kg, at least 1500 mg/kg, at least 1600 mg/kg, at least 1700 mg/kg, at least 1800 mg/kg, at least 1900 mg/kg, or at least 2000 mg/kg, patient weight.

[0192] In some embodiments, the neutralizing antibodies or fragments thereof are administered at a dose ranging from 1-10 g, 100 mg-1 g, 1-100 mg, 1-75 mg, 1-50 mg, 1-25 mg, 1-10 mg, 1-5 mg, 1-4 mg, or 1-2 mg. In some embodiments, the second pharmaceutical composition comprises neutralizing antibodies or fragments thereof at a concentration ranging from 1-10 g/ml, 100 mg/ml-1 g/ml, 1-100 mg/ml, 1-75 mg/ml, 1-50 mg/ml, 1-25 mg/ml, 1-10 mg/ml, 1-5 mg/ml, 1-4 mg/ml, or 1-2 mg/ml.

[0193] In some embodiments, the second pharmaceutical composition is administered as a single-dose. In some embodiments, the second pharmaceutical composition is administered daily. In some embodiments, the second pharmaceutical composition is administered 1 time a day, 2 times a day, 3 times a day, 4 times a day, 5 times a day, 6 times a day, or 7 times a day. In certain embodiments, the second pharmaceutical composition is administered for no more than 1 week, no more than 6 days, no more than 5 days, no more than 4 days, no more than 3 days, or no more than 2 days.

[0194] In certain embodiments, administration of the second pharmaceutical composition takes at least 1 minute, at least 2 minutes, at least 3 minutes, at least 4 minutes, at least 5 minutes, at least 6 minutes, at least 7 minutes, at least 8 minutes, at least 9 minutes, at least 10 minutes, at least 15 minutes, at least 20 minutes, at least 25 minutes, at least 30 minutes, at least 45 minutes, at least 50 minutes, or at least 60 minutes. In certain embodiments, administration of the second pharmaceutical composition takes 1 minute, 2 minutes, 3 minutes, 4 minutes, 5 minutes, 6 minutes, 7 minutes, 8 minutes, 9 minutes, 10 minutes, 15 minutes, 20 minutes, 25 minutes, 30 minutes, 45 minutes, 50 minutes, 60 minutes, 70 minutes, 80 minutes, 90 minutes, 100 minutes, 110 minutes, or 120 minutes.

[0195] 6.3.4. Effective Amounts of Neutralizing Antibodies

[0196] In preferred embodiments, an effective amount of an AAV-neutralizing antibody or antigen-binding fragment is adjunctively administered to a patient via systemic administration. An effective amount as provided herein refers to an amount sufficient to reduce biodistribution of AAV or rAAV outside of a target tissue or target organ.

[0197] In some embodiments, the effective amount is an amount sufficient to reduce detection of AAV or rAAV in the liver, spleen, cervical DRG, lumbar DRG, heart, and/or kidney. In some embodiments, the effective amount is an amount sufficient to reduce detection of AAV or rAAV in the liver, spleen and/or heart. In some embodiments, the effective amount is an amount sufficient to reduce detection of AAV or rAAV in the DRG.

[0198] In some embodiments, the effective amount is an amount sufficient to reduce levels of binding antibodies (BAb) (e.g., IgG and/or IgM) developed to AAV or rAAV in the cerebrospinal fluid (CSF) as compared to levels in the serum. In some embodiments, the effective amount is an amount sufficient to reduce levels of IgM and/or IgG antibodies developed to AAV or rAAV in the CSF as compared to levels in the serum.

[0199] Biodistribution of rAAVs can be tested in an experimental animal by measuring presence of rAAV genome, rAAV infection or expression of an expressible polynucleotide. In some embodiments, targeting is measured in a non-human primate (NHP), mice, rats, birds, rabbits, guinea pigs, hamsters, farm animals (including pigs and sheep), dogs, or cats.

[0200] In some embodiments, specific and non-specific targeting of rAAVs to tissues or organs can be measured after non-systemic administration of rAAVs, and/or after non-systemic administration of rAAV and systemic administration of the neutralizing antibody or antigen-binding fragment thereof. In some embodiments, targeting of rAAVs is measured after non-systemic administration of rAAV and after systemic administration of an antibody or antigen binding fragment capable of neutralizing the rAAV.

[0201] 6.4. Kit

[0202] In one aspect, the present disclosure provides a kit for combination therapy, comprising: a first pharmaceutical composition comprising a recombinant adeno associated virus (rAAV) as described herein; and a second pharmaceutical composition comprising an AAV-neutralizing antibody or antigen-binding fragment thereof as described herein.

[0203] In some embodiments, the antibody or antigen-binding fragments thereof binds to a capsid protein of the rAAV as described in Section 5.3.1.

[0204] In some embodiments, the antibody or antigen-binding fragment thereof is an IgG.

[0205] In some embodiments, the second pharmaceutical composition is capable of neutralizing the rAAV. In certain embodiments, the second pharmaceutical composition is capable of neutralizing an AAV or rAAV containing a capsid protein of an AAV, selected from AAV2; AAV1; AAV6; AAV3; AAV LK03; AAV7; AAV8; AAV hu.37; AAV rh.10; AAV9; AAV hu.68; AAV10; AAV5; AAV3-3; AAV4-4; AAV1-A; hu.46-A; hu.48-A; hu.44-A; hu.43-A; AAV6-A; hu.34-B; hu.47-B; hu.29-B; rh.63-B; hu.56-B; hu.45-B; rh.57-B; rh.35-B; rh.58-B; rh.28-B; rh.51-B; rh.19-B; rh.49-B; rh.52-B; rh.13-B; AAV2-B; rh.20-B; rh.24-B; rh.64-B; hu.27-B; hu.21-B; hu.22-B; hu.23-B; hu.7-C; hu.61-C; rh.56-C; hu. 9-C; hu.54-C; hu.53-C; hu.60-C; hu.55-C; hu.2-C; hu.1-C; hu.18-C; hu.3-C; hu.25-C; hu.15-C; hu.16-C; hu.11-C; hu.10-C; hu.4-C; rh.54-D; rh.48-D; rh.55-D; rh.62-D; AAV7-D; rh.52-E; rh.51-E; hu.39-E; rh.53-E; hu.37-E; rh.43-E; rh.50-E; rh.49-E; rh.61-E; hu.41-E; rh.64-E; hu.42-E; rh.57-E; rh.40-E; hu.67-E; hu.17-E; hu.6-E; hu.66-E; rh.38-E; hu.32-F; AAV9/hu; hu.31-F; Anc80; Anc81; Anc82; Anc83; Anc84; Anc94; Anc113; Anc126; Anc127; Anc80L27; Anc80L59; Anc80L60; Anc80L62; Anc80L65; Anc80L33; Anc80L36; Anc80L44; Anc80L1; Anc110; and Anc80DI, or a variation thereof.

[0206] In some embodiments, the second pharmaceutical composition comprises polyclonal antibodies obtained from at least 100 donors. In some embodiments, second pharmaceutical composition comprises polyclonal antibodies obtained from at least 500, at least 1000, at least 5000, or at least 10,000 donors.

[0207] In some embodiments, the second pharmaceutical composition comprises intravenous immunoglobulin (IVIG). In some embodiments, the second pharmaceutical composition comprises recombinant intravenous immunoglobulin (rIVIG). In certain embodiments, the IVIG is selected from: Gammagard™ Liquid® (Baxter HealthCare Corp), Gammagard™ S/D, Gammaplex™, Bivigam™, Carimune™ NF, Gamunex-C, Gammaked™, Flebogamma™ DIF, Octagam™, and Privigen™.

[0208] In some embodiments, the second pharmaceutical composition comprises recombinant polyclonal antibodies.

[0209] In some embodiments, the second pharmaceutical composition comprises an AAV-neutralizing antigen-binding fragment selected from: a single chain Fv (scFv), a Fab, a (Fab″)₂, and an (ScFv)₂. In some embodiments, the second pharmaceutical composition comprises: a bispecific antibody, a single-domain antibody (dAb), a diabody (db), a nanobody, a unibody, and a diabody.

[0210] In some embodiments, the rAAV has a capsid protein of an AAV as described in Section 5.3.1.

### 6.5. EXAMPLES

[0211] The following examples are provided by way of illustration not limitation.

### 6.5.1. Example 1: Adjunct Administration of IVIG with Non-Systemic Administration of rAAV

[0212] This experiment was performed to test the hypothesis that systemic administration of IVIG restricts the biodistribution of ICV administered AAV9.CAG.GFP. In particular, the experiment was designed to evaluate whether IVIG administration prior to ICV administration of AAV9.CAG.GFP limits AAV vector dissemination from the CNS into peripheral organs, such as the liver, heart, and kidney. After ICV administration of AAV, vector is often found in peripheral organs such as the liver, as well as in the DRGs. How vector escapes the CNS is unclear. IVIG, a purified mix of IgG obtained from thousands of healthy donors, contains neutralizing antibodies against many AAV serotypes, including AAV9. The hypothesis was that systemic administration of IVIG prior to ICV administration of AAV9.CAG.GFP will neutralize vector escaping the CNS and prevent transduction of peripheral organs such as the liver. As shown below, this experiment proved that IVIG administration limits vector dissemination from the CNS into peripheral organs.

[0213] 6.5.1.1. Experimental Design

[0214] Mice to be treated were divided into five treatment Groups (Groups 1-5). Group 1 received an ICV saline injection and served as a vehicle control. Group 2 received AAV9.CAG.GFP by ICV injection. Group 3 was administered 20 mg of IVIG (10 mg IVIG/mL blood) by IV injection 2 hour prior to ICV injection of AAV9.CAG.GFP. Group 4 was administered 20 mg of IVIG by IV injection 24 hour prior to ICV injection of AAV9.CAG.GFP. Group 5 was administered the same dose of AAV9.CAG.GFP by IV injection as a control for vector transduction of peripheral organs. Table 1 provides a summary of the experimental design including experimental conditions for Groups 1-5.

TABLE 1
Experimental Design

| Group | | | | | | Dose Level |
|---|---|---|---|---|---|---|
| No. | n | Test Material | IVIG | | Route | (per animal) |
| 1 | 1 | Vehicle Control | — | | ICV | 0 |
| 2 | 5 | AAV9.CAG.GFP | — | | ICV | 5 × 10¹⁰ |
| 3 | 5 | AAV9.CAG.GFP | 2 | h | ICV | 5 × 10¹⁰ |
| 4 | 5 | AAV9.CAG.GFP | 24 | h | ICV | 5 × 10¹⁰ |

| | | | | | |
|---|---|---|---|---|---|
| 5 | 3 | AAV9.CAG.GFP | — | IV | 5 × 10¹⁰ |

[0215] Tissues were collected at necropsy (day 14) to assess vector biodistribution (AAV genomic DNA) and eGFP expression (eGFP mRNA). In addition, blood was collected prior to vector administration (day 0) to validate IVIG administration via neutralizing antibody (NAb) titer assay. Blood and CSF were also collected at necropsy. Upon harvesting, tissue was immediately placed into the preservative RNAlater, after which the RNAlater was removed and the tissue flash frozen or placed into lysis buffer containing proteinase K for DNA isolation. Additional tissue material from the same tissues was fixed and embedded for sectioning and anti-GFP staining by immunohistochemistry (IHC).

[0216] 6.5.1.2. Neutralizing Antibody Titer Analysis

[0217] Neutralizing antibody (NAb) titer analysis was performed on serum from study animals using an in vitro NAb assay. AAV NAb testing was performed by the Immunology Core at the Gene Therapy Program of the University of Pennsylvania as previously described (Calcedo et al. Human Gene Ther Methods. 2018 Apr.; 29(2): 86-95, which is herein incorporated by reference in its entirety).

[0218] As shown in Table 1, the mice did not have preexisting antibodies to AAVs and were seronegative prior to study enrollment. On the day of vector administration (Day 1, 2 hour, or 24 hour post-IVIG administration in applicable groups) serum samples were collected prior to vector administration and evaluated for NAbs. The NAb titers are shown in Table 2. Animals administered IVIG, Animal ID #7-#16 had similar NAb titers to IVIG controls (fresh IVIG samples not administered to animals). As expected, animals not administered IVIG had NAb titers below the threshold of detection.

TABLE 2
Levels of anti-AAV9 Neutralizing Antibody Prior to Vector Dosing

| | | | | | AAV9 NAb₅₀ |
|---|---|---|---|---|---|
| | | | | | Titer in |
| | | | | Sample | HEK293 |
| Animal # | Vector Treatment | IVIG | | Type | cells^{1,2} |
| MR-18-2 | AAV9.CAG.GFP, ICV | — | | Serum | <10* |
| MR-18-3 | AAV9.CAG.GFP, ICV | — | | Serum | <5 |
| MR-18-4 | AAV9.CAG.GFP, ICV | — | | Serum | <10* |
| MR-18-5 | AAV9.CAG.GFP, ICV | — | | Serum | <5 |
| MR-18-6 | AAV9.CAG.GFP, ICV | — | | Serum | <5 |
| MR-18-7 | AAV9.CAG.GFP, ICV | 2 | h | Serum | 320 |
| MR-18-8 | AAV9.CAG.GFP, ICV | 2 | h | Serum | 160 |
| MR-18-9 | AAV9.CAG.GFP, ICV | 2 | h | Serum | 40 |
| MR-18-10 | AAV9.CAG.GFP, ICV | 2 | h | Serum | 80 |
| MR-18-11 | AAV9.CAG.GFP, ICV | 2 | h | Serum | 160 |
| MR-18-12 | AAV9.CAG.GFP, ICV | 24 | h | Serum | 80 |
| MR-18-13 | AAV9.CAG.GFP, ICV | 24 | h | Serum | 80 |
| MR-18-14 | AAV9.CAG.GFP, ICV | 24 | h | Serum | 80 |
| MR-18-15 | AAV9.CAG.GFP, ICV | 24 | h | Serum | 160 |
| MR-18-16 | AAV9.CAG.GFP, ICV | 24 | h | Serum | 80 |

| | | | | |
|---|---|---|---|---|
| MR-18-17 | AAV9.CAG.GFP, IV | — | Serum | <40** |
| MR-18-18 | AAV9.CAG.GFP, IV | — | Serum | <10* |
| MR-18-19 | AAV9.CAG.GFP, IV | — | Serum | <10* |
| — | — | — | IVIG | 160 |
| — | — | — | IVIG | 320 |

¹MR-18-7 to MR-18-16 and IVIG sample types (bottom two rows) had positive NAb responses and MR-18-2 to MR-18-6 and MR-18-17 to MR-18-19 had negative NAb responses.
²Values are the serum reciprocal dilution at which relative luminescence units (RLUs) were reduced 50% compared to virus control wells (no test sample). Limit of detection ⅕ dilution.
*Limit of detection 1/10 dilution- not enough serum available for ⅕ dilution.
**Limit of detection 1/40 dilution- not enough serum available for ⅕ dilution.

[0219] 6.5.1.3.Binding Antibody Titer Analysis

[0220] Murine B cell responses were evaluated in serum and CSF using an in vitro Binding antibody (BAb) ELISA. BAb titer analysis was performed on serum and cerebrospinal fluid from study animals using the in vitro BAb ELISA assay at day 14 (necropsy). AAV9 BAb testing was performed as previously described (Calcedo et al. Human Gene Ther Methods. 2018 April; 29(2): 86-95), using anti-mouse IgM-HRP (Invitrogen, Cat. No. 31456) or anti-mouse IgG-HRP (Promega, Cat. No. W402B). Groups were pooled for analysis of IgG in serum and CSF.

[0221] IgM BAb titers are shown in Table 3 for individual animals.

TABLE 3
Mouse IgM Bab Titer 14 days Post-Dosing

| | | | | | IgM BAb |
|---|---|---|---|---|---|
| Sample | Groups | Vector Treatment | IVIG | | Titer (1:X) |
| 1 | 1 | Saline | — | | 20 |
| 2 | 2 | AAV9.CAG.GFP, ICV | — | | >1280 |
| 3 | 2 | AAV9.CAG.GFP, ICV | — | | 640 |
| 4 | 2 | AAV9.CAG.GFP, ICV | — | | 640 |
| 5 | 2 | AAV9.CAG.GFP, ICV | — | | 640 |
| 6 | 2 | AAV9.CAG.GFP, ICV | — | | ND |
| 7 | 3 | AAV9.CAG.GFP, ICV | 2 | h | 160 |
| 8 | 3 | AAV9.CAG.GFP, ICV | 2 | h | 160 |
| 9 | 3 | AAV9.CAG.GFP, ICV | 2 | h | 320 |
| 10 | 3 | AAV9.CAG.GFP, ICV | 2 | h | 40 |
| 11 | 3 | AAV9.CAG.GFP, ICV | 2 | h | ND |
| 12 | 4 | AAV9.CAG.GFP, ICV | 24 | h | 160 |
| 13 | 4 | AAV9.CAG.GFP, ICV | 24 | h | 80 |
| 14 | 4 | AAV9.CAG.GFP, ICV | 24 | h | 80 |
| 15 | 4 | AAV9.CAG.GFP, ICV | 24 | h | 160 |
| 16 | 4 | AAV9.CAG.GFP, ICV | 24 | h | 80 |

| | | | | |
|---|---|---|---|---|
| 17 | 5 | AAV9.CAG.GFP, IV | — | 320 |
| 18 | 5 | AAV9.CAG.GFP, IV | — | 40 |
| 19 | 5 | AAV9.CAG.GFP, IV | — | 40 |

[0222] IgG BAb titers are shown in Table 4 from pooled groups.

TABLE 4
Mouse IgG BAb Titers 14 Days Post-Dosing

| | | | Sample | IgG BAb |
|---|---|---|---|---|
| Group # | Vector Treatment | IVIG | Type | Titer (1:X) |
| 1 | Saline | — | Serum | 20 |
| 2 | AAV9.CAG.GFP, ICV | — | Serum | 64000 |
| 3 | AAV9.CAG.GFP, ICV | — | Serum | 64000 |
| 4 | AAV9.CAG.GFP, ICV | — | Serum | 32000 |
| 5 | AAV9.CAG.GFP, ICV | — | Serum | >1280 |
| 1 | AAV9.CAG.GFP, ICV | — | CSF | <100 |
| 2 | AAV9.CAG.GFP, ICV | 2 h | CSF | 400 |
| 3 | AAV9.CAG.GFP, ICV | 2 h | CSF | 200 |
| 4 | AAV9.CAG.GFP, ICV | 2 h | CSF | 100 |
| 5 | AAV9.CAG.GFP, ICV | 2 h | CSF | 400 |

[0223] As shown in Tables 3 and 4, mice treated with IVIG prior to dosing of AAV developed lower levels of IgM and/or IgG antibodies to AAV in the CSF as compared to levels of IgM and/or IgG antibodies in the serum. This suggests that IVIG protects the CNS from developing high levels of IgM and/or IgG antibodies to administered AAV capsids.

[0224] 6.5.1.4. Vector Genome Biodistribution

[0225] Vector genome distribution (i.e., AAV vector genomic DNA) in various tissues was measured by ddPCR and presented as the ratio of eGFP DNA copy number over RPP30 DNA copy number (eGFP/RPP30), a rough indicator of vector genome copies per cell. Tissues were harvested 14 days after AAV9.CAG.GFP injection and DNA was isolated. DNA was analyzed using the Bio-Rad ddPCR Supermix for Probes (no dUTP) (Bio-Rad 1863024) in combination with primers and probes specific for DNA encoding the eGFP transgene and DNA encoding the non-human primate RPP30 reference. Primers and probes were designed to include intronic sequences to prevent contaminating RNA from interfering with accurate quantitation of vector genomes. After thermal cycling, samples were analyzed on the Bio-Rad QX200 Droplet Reader instrument using the Absolute Quantitation program.

[0226] The results of the vector genome biodistribution measurements are provided in FIGS. 1A (brain), 2B (liver), 2C (spleen), 2D (cervical DRG), 2E (lumbar DRG), 2F (heart), and 2G (Kidney). For example, the copies (cp)/μL quantities for the DNA encoding the eGFP transgene were normalized to the cp/μL quantities of the DNA encoding the RPP30 reference and multiplied by 100 to generate a ratio of eGFP DNA copy number over RPP30 DNA copy number. For each tissue, results from three biological replicates were provided for each treatment. Statistically significant differences were determined by an ANOVA 1-way test with P-values and indicated with asterisks. * P<0.05, ** p<0.002; *** P<0.001; **** p<0.0001, ns=not significant.

[0227] FIG. 1A shows the ratio of eGFP to RPP30 DNA copy number in the brain. No significant difference was observed between any treatment groups.

[0228] FIG. 1B shows the ratio of eGFP to RPP30 DNA copy number in the liver. IVIG administration 2 hours or 24 hours prior to AAV9.CAG.GFP ICV administration resulted in a decrease in vector transduction.

[0229] FIG. 1C shows the ratio of eGFP to RPP30 DNA copy number in the spleen. Animals dosed with AAV9 via tail vein IV-injection had similar copies of vector genomes compared to ICV-injected controls, suggesting that vector is escaping the CNS into circulation. Animals administered IVIG 2 hours prior to AAV9.CAG.GFP ICV administration led to a significant increase in vector genomes, while the group administered IVIG 24 hours prior to AAV9.CAG.GFP ICV administration displayed an elevated but not significant increase in vector genomes. This is possibly due to clearance or degradation of some IVIG in the circulation prior vector administration in the 24 h treatment. This result is expected, as antibody-bound capsid is targeted for engulfment by phagocytic cells in the circulation. Thus, this increase in vector genomes in the spleen is likely inactivated AAV vector in macrophages, neutrophils, and dendritic cell populations present in the spleen at the time of necropsy (day 14).

[0230] FIGS. 1D-1E shows the ratio of eGFP to RPP30 DNA copy number in cervical DRGs (FIG. 1D) and lumbar DRGs (FIG. 1E).

[0231] FIG. 1F shows the ratio of eGFP to RPP30 DNA copy number in the heart. Animals administered AAV9.CAG.GFP via ICV or IV injection had similar vector transduction of heart muscle. Animals administered IVIG either 2 hours or 24 hours prior to AAV9.CAG.GFP ICV administration had reduced vector transduction (i.e., fewer vector genome copies per cell) in the heart, which was statistically significantly at 24 hours.

[0232] FIG. 1G shows the ratio of eGFP to RPP30 DNA copy number in the kidney. Animals administered AAV9.CAG.GFP via ICV or IV had similar levels of vector transduction. Animals administered IVIG either 2 hours or 24 hours prior to AAV9.CAG.GFP ICV administration had significantly reduced vector transduction (i.e., fewer vector genome copies per cell) in the kidney.

[0233] 6.5.1.5. Gene Expression

[0234] eGFP mRNA expression in various tissues was measured by RT-ddPCR and presented as the ratio of eGFP transcripts over RPP30 transcripts (eGFP/RPP30), a rough indicator of eGFP mRNA copies per cell. Tissues were harvested 14 days after injection and RNA was isolated. RNA from samples were analyzed using the Bio-Rad One-Step RT-ddPCR Advanced Kit for Probes (Bio-Rad 1864022) in combination with primers and probes specific for the eGFP transgene and the non-human primate RPP30 reference gene. The reverse primer for both targets acted as the reverse transcription primer for the reverse transcription step. Where possible, primers and probes were designed across exon-exon junctions to prevent cross-reactivity with contaminating DNA. After thermal cycling, samples were analyzed on the QX200 Droplet Reader instrument using the Absolute Quantitation program.

[0235] The results of the eGFP mRNA expression measurements are provided in FIGS. 2A (brain), 2B(liver), 2C (spleen), 2D (cervical/thoracic DRG), 2E (lumbar DRG), 2F (heart), and 2G (Kidney). For example, the cp/μL quantities for the eGFP transgene were normalized to the cp/μL quantities of the RPP30 reference gene and multiplied by 100 to generate a ratio of eGFP transcripts over RPP30 transcripts (eGFP/RPP30). For each tissue, results from three biological replicates were provided for each condition. Statistically significant differences were determined by an ANOVA 1-way test with P-values and indicated with asterisks. * P<0.05, ** p<0.002; *** P<0.001; **** p<0.0001, ns=not significant.

[0236] FIG. 2A shows the ratio of eGFP to RPP30 transcripts in the brain. Animals treated with IVIG showed no difference in eGFP mRNA expression compared to animals dosed with AAV9.CAG.GFP via ICV administration.

[0237] FIG. 2B shows the ratio of eGFP to RPP30 transcripts in the liver. Animals dosed with AAV9.CAG.GFP via ICV displayed similar levels of eGFP mRNA expression to animals dosed with AAV9.CAG.GFP via IV tail vein injection. Animals administered IVIG either 2 hours or 24 hours prior to AAV9.CAG.GFP ICV administration showed significantly reduced eGFP mRNA expression. This expression data is in line with the vector genome biodistribution data.

[0238] FIG. 2C shows the ratio of eGFP to RPP30 transcripts in the spleen. Animals dosed with AAV9.CAG.GFP by ICV administration had reduced expression of GFP compared to animals dosed with AAV9.CAG.GFP by IV administration. Animals administered IVIG either 2 hours or 24 hours prior to AAV9.CAG.GFP ICV administration showed slight reduction in GFP expression compared to the ICV-only dosed group, but the reduction was not statistically significant.

[0239] FIGS. 2D-2E show the ratio of eGFP to RPP30 transcripts in cervical/thoracic DRG (FIG. 2D) and lumbar DRG (FIG. 2E). In both cervical/thoracic and lumbar DRG groups, animals dosed with AAV9.CAG.GFP via ICV administration showed no difference in expression of eGFP mRNA compared to animals treated with IVIG prior to AAV9.CAG.GFP ICV administration. Animals dosed with AAV9.CAG.GFP via ICV administration do have slightly increased (but not statistically significant) GFP expression compared to animals dosed with AAV9.CAG.GFP via IV administration.

[0240] FIG. 2F shows the ratio of eGFP to RPP30 transcripts in the heart. Animals administered IVIG either 2 hours or 24 hours prior to AAV9.CAG.GFP ICV administration showed reduced, but not statistically significant, GFP expression.

[0241] FIG. 2G shows the ratio of eGFP to RPP30 transcripts in the kidney. Animals administered IVIG either 2 hours or 24 hours prior to AAV9.CAG.GFP ICV administration showed significantly reduced GFP expression.

[0242] 6.5.1.6. Protein Expression

[0243] Tissue samples for IHC analysis were collected at day 14 post vector administration and immediately placed into 10% neutral buffered formalin for approximately 48 hours and then transferred to 70% ethanol. Samples in ethanol were shipped at ambient temperature to Histoserv (Germantown, MD). Briefly, tissue samples were trimmed and embedded in paraffin. The resulting blocks were sectioned via microtome, mounted to glass slides, and stained for detection of GFP. Briefly, slides were baked for 15 minutes at 55-65° C. to help remove paraffin and stained using GeneTex, GTX20290 GFP antibody at 1:1,000 in Monet Blue diluent and an anti-rabbit HRP labelled secondary antibody (Biocare Medical, BRR4009). Betazoid DAB (Biocare Medical, BDB2004) was used for development and Mayer's Hematoxylin (StatLab, HXMMHPT) for counterstaining. Representative images from each condition (i.e., saline; AAV9.CAG.GFP ICV; AAV9.CAG.GFP ICV with 2-hour IVIG; AAV9.CAG.GFP with 24 hour IVIG; or AAV9.CAG.GFP IV) are provided in FIGS. 3A (brain), 3B(liver), 3C (spleen), 3D (cervical/thoracic DRG), 3E (lumbar DRG), 3F (heart), and 3G (Kidney).

[0244] FIG. 3A shows representative images of brain cross-sections obtained after anti-GFP IHC. FIG. 3A shows eGFP expression in the brains of ICV-dosed animals, as expected. There was little to no expression of eGFP in brains dosed via IV injection, and no background in the saline control. Table 5 provides a summary of percentage of GFP⁺ brain cells for each animal.

TABLE 5
Percentage of GFP⁺ Brain Cells

| | | | | GFP % + | |
|---|---|---|---|---|---|
| Animal # | Vector Treatment | IVIG* | | Cells | −Control |
| MR-18-1 | Saline | — | | 0 | 0 |
| MR-18-2 | AAV9.CAG.GFP, ICV | — | | 5 | 0 |
| MR-18-3 | AAV9.CAG.GFP, ICV | — | | 15 | 0 |
| MR-18-4 | AAV9.CAG.GFP, ICV | — | | 2 | 0 |
| MR-18-5 | AAV9.CAG.GFP, ICV | — | | 7 | 0 |
| MR-18-6 | AAV9.CAG.GFP, ICV | — | | 17 | 0 |
| MR-18-7 | AAV9.CAG.GFP, ICV | 2 | h | 3 | 0 |
| MR-18-8 | AAV9.CAG.GFP, ICV | 2 | h | 2 | 0 |
| MR-18-9 | AAV9.CAG.GFP, ICV | 2 | h | 12 | 0 |
| MR-18-10 | AAV9.CAG.GFP, ICV | 2 | h | 1 | 0 |
| MR-18-11 | AAV9.CAG.GFP, ICV | 2 | h | 8 | 0 |
| MR-18-12 | AAV9.CAG.GFP, ICV | 24 | h | 3 | 0 |
| MR-18-13 | AAV9.CAG.GFP, ICV | 24 | h | 4 | 0 |
| MR-18-14 | AAV9.CAG.GFP, ICV | 24 | h | 4 | 0 |
| MR-18-15 | AAV9.CAG.GFP, ICV | 24 | h | 13 | 0 |
| MR-18-16 | AAV9.CAG.GFP, ICV | 24 | h | 14 | 0 |

| | | | | |
|---|---|---|---|---|
| MR-18-17 | AAV9.CAG.GFP, IV | — | 0+ | 0 |
| MR-18-18 | AAV9.CAG.GFP, IV | — | 0 | 0 |
| MR-18-19 | AAV9.CAG.GFP, IV | — | 0 | 0 |

*MR-18-7 to MR-18-16 had positive NAb responses and MR-18-2 to MR-18-6 and MR-18-17 to MR-18-19 had negative NAb responses.

[0245] FIG. 3B shows representative images of liver cross-sections obtained after anti-GFP IHC. GFP expression was evident in groups dosed with AAV alone, either ICV or IV injection. In animals administered IVIG either 2 hours or 24 hours prior to AAV9.CAG.GFP ICV administration, no GFP expression was detected in the liver, which was similar to saline injected control. One exception is animal #15, in the 24-hour IVIG treatment group, which had few GFP positive cells (See Table 6). This animal also had a higher amount of GFP expression compared to the other animals in the group as measured by RT-ddPCR. Table 6 provides a summary of percentage of GFP⁺ liver cells for each animal.

TABLE 6
Percentage of GFP⁺ Liver Cells

| Animal # | Vector Treatment | IVIG* | | Tissue | % GFP + Cells |
|---|---|---|---|---|---|
| MR-18-1 | Saline | — | | Liver | 0 |
| MR-18-2 | AAV9.CAG.GFP, ICV | — | | Liver | 94 |
| MR-18-3 | AAV9.CAG.GFP, ICV | — | | Liver | 60 |
| MR-18-4 | AAV9.CAG.GFP, ICV | — | | Liver | 72 |
| MR-18-5 | AAV9.CAG.GFP, ICV | — | | Liver | 75 |
| MR-18-6 | AAV9.CAG.GFP, ICV | — | | Liver | 88 |
| MR-18-7 | AAV9.CAG.GFP, ICV | 2 | h | Liver | 0 |
| MR-18-8 | AAV9.CAG.GFP, ICV | 2 | h | Liver | 0 |
| MR-18-9 | AAV9.CAG.GFP, ICV | 2 | h | Liver | 0 |
| MR-18-10 | AAV9.CAG.GFP, ICV | 2 | h | Liver | 0 |
| MR-18-11 | AAV9.CAG.GFP, ICV | 2 | h | Liver | 0 |
| MR-18-12 | AAV9.CAG.GFP, ICV | 24 | h | Liver | 0+ |
| MR-18-13 | AAV9.CAG.GFP, ICV | 24 | h | Liver | 0 |
| MR-18-14 | AAV9.CAG.GFP, ICV | 24 | h | Liver | 0 |
| MR-18-15 | AAV9.CAG.GFP, ICV | 24 | h | Liver | 2 |
| MR-18-16 | AAV9.CAG.GFP, ICV | 24 | h | Liver | 0 |

| | | | | |
|---|---|---|---|---|
| MR-18-17 | AAV9.CAG.GFP, IV | — | Liver | 91 |
| MR-18-18 | AAV9.CAG.GFP, IV | — | Liver | 92 |
| MR-18-19 | AAV9.CAG.GFP, IV | — | Liver | 93 |

*MR-18-7 to MR-18-16 had positive NAb responses and MR-18-2 to MR-18-6 and MR-18-17 to MR-18-19 had negative NAb responses.

[0246] FIG. 3C shows representative images of spleen cross-sections obtained after anti-GFP IHC. No difference in GFP expression was detected between any treatment groups. Due to the nature of the spleen, a high degree of background is present in saline-injected animals. Table 7 provides a summary of percentage of GFP⁺ spleen cells for each animal.

TABLE 7
Percentage of GFP⁺ Spleen Cells

| | | | | GFP % + | |
|---|---|---|---|---|---|
| Animal # | Vector Treatment | IVIG* | | Cells | −Control |
| MR-18-1 | Saline | — | | 0 | 0 |
| MR-18-2 | AAV9.CAG.GFP, ICV | — | | 0 | 0 |
| MR-18-3 | AAV9.CAG.GFP, ICV | — | | 0 | 0 |
| MR-18-4 | AAV9.CAG.GFP, ICV | — | | 0 | 0 |
| MR-18-5 | AAV9.CAG.GFP, ICV | — | | 0 | 0 |
| MR-18-6 | AAV9.CAG.GFP, ICV | — | | 0 | 0 |
| MR-18-7 | AAV9.CAG.GFP, ICV | 2 | h | 0 | 0 |
| MR-18-8 | AAV9.CAG.GFP, ICV | 2 | h | 0 | 0 |
| MR-18-9 | AAV9.CAG.GFP, ICV | 2 | h | 0 | 0 |
| MR-18-10 | AAV9.CAG.GFP, ICV | 2 | h | 0 | 0 |
| MR-18-11 | AAV9.CAG.GFP, ICV | 2 | h | 0 | 0 |
| MR-18-12 | AAV9.CAG.GFP, ICV | 24 | h | 0 | 0 |
| MR-18-13 | AAV9.CAG.GFP, ICV | 24 | h | 0 | 0 |
| MR-18-14 | AAV9.CAG.GFP, ICV | 24 | h | 0 | 0 |
| MR-18-15 | AAV9.CAG.GFP, ICV | 24 | h | 0 | 0 |
| MR-18-16 | AAV9.CAG.GFP, ICV | 24 | h | 0 | 0 |

| | | | | |
|---|---|---|---|---|
| MR-18-17 | AAV9.CAG.GFP, IV | — | 0+ | 0 |
| MR-18-18 | AAV9.CAG.GFP, IV | — | 0 | 0 |
| MR-18-19 | AAV9.CAG.GFP, IV | — | 0 | 0 |

*MR-18-7 to MR-18-16 had positive NAb responses and MR-18-2 to MR-18-6 and MR-18-17 to MR-18-19 had negative NAb responses.

[0247] FIGS. 3D-3E show representative images of cervical/thoracic DRG cross-sections (FIG. 3D) and lumbar DRG cross-sections (FIG. 3E) obtained after anti-GFP IHC. Table 8 and Table 9 provides a summary of percentage of GFP⁺ cells in cervical/thoracic DRG (Table 8) and lumbar DRG (Table 9).

TABLE 8
Percentage of GFP⁺ Cervical/Thoracic DRG

| | | | | GFP % + | |
|---|---|---|---|---|---|
| Animal # | Vector Treatment | IVIG* | | Cells | −Control |
| MR-18-1 | Saline | — | | 0 | 0 |
| MR-18-2 | AAV9.CAG.GFP, ICV | — | | 0 | 0 |
| MR-18-3 | AAV9.CAG.GFP, ICV | — | | + | 0 |
| MR-18-4 | AAV9.CAG.GFP, ICV | — | | + | 0 |
| MR-18-5 | AAV9.CAG.GFP, ICV | — | | 0 | 0 |
| MR-18-6 | AAV9.CAG.GFP, ICV | — | | 0 | 0 |
| MR-18-7 | AAV9.CAG.GFP, ICV | 2 | h | + | 0 |
| MR-18-8 | AAV9.CAG.GFP, ICV | 2 | h | + | 0 |
| MR-18-9 | AAV9.CAG.GFP, ICV | 2 | h | + | 0 |
| MR-18-10 | AAV9.CAG.GFP, ICV | 2 | h | + | 0 |
| MR-18-11 | AAV9.CAG.GFP, ICV | 2 | h | 0 | 0 |
| MR-18-12 | AAV9.CAG.GFP, ICV | 24 | h | 0 | 0 |
| MR-18-13 | AAV9.CAG.GFP, ICV | 24 | h | + | 0 |
| MR-18-14 | AAV9.CAG.GFP, ICV | 24 | h | + | 0 |
| MR-18-15 | AAV9.CAG.GFP, ICV | 24 | h | 0 | 0 |
| MR-18-16 | AAV9.CAG.GFP, ICV | 24 | h | 0 | 0 |

| | | | | |
|---|---|---|---|---|
| MR-18-17 | AAV9.CAG.GFP, IV | — | 0 | 0 |
| MR-18-18 | AAV9.CAG.GFP, IV | — | 0 | 0 |
| MR-18-19 | AAV9.CAG.GFP, IV | — | 0 | 0 |

*MR-18-7 to MR-18-16 had positive NAb responses and MR-18-2 to MR-18-6 and MR-18-17 to MR-18-19 had negative NAb responses.

TABLE 9
Percentage of GFP⁺ Lumbar DRG

| | | | | GFP % + | |
|---|---|---|---|---|---|
| Animal # | Vector Treatment | IVIG* | | Cells | −Control |
| MR-18-1 | Saline | — | | 0 | 0 |
| MR-18-2 | AAV9.CAG.GFP, ICV | — | | 0 | 0 |
| MR-18-3 | AAV9.CAG.GFP, ICV | — | | + | 0 |
| MR-18-4 | AAV9.CAG.GFP, ICV | — | | 0 | 0 |
| MR-18-5 | AAV9.CAG.GFP, ICV | — | | 0 | 0 |
| MR-18-6 | AAV9.CAG.GFP, ICV | — | | 0 | 0 |
| MR-18-7 | AAV9.CAG.GFP, ICV | 2 | h | 0 | 0 |
| MR-18-8 | AAV9.CAG.GFP, ICV | 2 | h | + | 0 |
| MR-18-9 | AAV9.CAG.GFP, ICV | 2 | h | + | 0 |
| MR-18-10 | AAV9.CAG.GFP, ICV | 2 | h | + | 0 |
| MR-18-11 | AAV9.CAG.GFP, ICV | 2 | h | + | 0 |
| MR-18-12 | AAV9.CAG.GFP, ICV | 24 | h | Equivocal+ | 0 |
| MR-18-13 | AAV9.CAG.GFP, ICV | 24 | h | + | 0 |
| MR-18-14 | AAV9.CAG.GFP, ICV | 24 | h | + | 0 |
| MR-18-15 | AAV9.CAG.GFP, ICV | 24 | h | + | 0 |
| MR-18-16 | AAV9.CAG.GFP, ICV | 24 | h | 0 | 0 |

| | | | | |
|---|---|---|---|---|
| MR-18-17 | AAV9.CAG.GFP, IV | — | 0 | 0 |
| MR-18-18 | AAV9.CAG.GFP, IV | — | 0 | 0 |
| MR-18-19 | AAV9.CAG.GFP, IV | — | 0 | 0 |

*MR-18-7 to MR-18-16 had positive NAb responses and MR-18-2 to MR-18-6 and MR-18-17 to MR-18-19 had negative NAb responses.

[0248] FIG. 3F shows representative images of heart cross-sections obtained after anti-GFP IHC. GFP expression was observed in the heart in groups treated with AAV9.CAG.GFP by either ICV or IV administration. In animals administered IVIG either 2 hours or 24 hours prior to AAV9.CAG.GFP ICV administration, no GFP expression was detected in the heart, which was similar to saline injected control. Table 10 provides a summary of percentage of GFP⁺ heart cells for each animal.

TABLE 10
Percentage of GFP⁺ Heart Cells

| | | | | GFP % + | |
|---|---|---|---|---|---|
| Animal # | Vector Treatment | IVIG* | | Cells | −Control |
| MR-18-1 | Saline | — | | 0 | 0 |
| MR-18-2 | AAV9.CAG.GFP, ICV | — | | 2 | 0 |
| MR-18-3 | AAV9.CAG.GFP, ICV | — | | 0+ | 0 |
| MR-18-4 | AAV9.CAG.GFP, ICV | — | | 1 | 0 |
| MR-18-5 | AAV9.CAG.GFP, ICV | — | | 0+ | 0 |
| MR-18-6 | AAV9.CAG.GFP, ICV | — | | 1 | 0 |
| MR-18-7 | AAV9.CAG.GFP, ICV | 2 | h | 0 | 0 |
| MR-18-8 | AAV9.CAG.GFP, ICV | 2 | h | 0 | 0 |
| MR-18-9 | AAV9.CAG.GFP, ICV | 2 | h | 0 | 0 |
| MR-18-10 | AAV9.CAG.GFP, ICV | 2 | h | 0 | 0 |
| MR-18-11 | AAV9.CAG.GFP, ICV | 2 | h | 0 | 0 |
| MR-18-12 | AAV9.CAG.GFP, ICV | 24 | h | 0 | 0 |
| MR-18-13 | AAV9.CAG.GFP, ICV | 24 | h | 0 | 0 |
| MR-18-14 | AAV9.CAG.GFP, ICV | 24 | h | 0 | 0 |
| MR-18-15 | AAV9.CAG.GFP, ICV | 24 | h | 0 | 0 |
| MR-18-16 | AAV9.CAG.GFP, ICV | 24 | h | 0 | 0 |

| | | | | |
|---|---|---|---|---|
| MR-18-17 | AAV9.CAG.GFP, IV | — | 2 | 0 |
| MR-18-18 | AAV9.CAG.GFP, IV | — | 2 | 0 |
| MR-18-19 | AAV9.CAG.GFP, IV | — | 2 | 0 |

*MR-18-7 to MR-18-16 had positive NAb responses and MR-18-2 to MR-18-6 and MR-18-17 to MR-18-19 had negative NAb responses.

[0249] FIG. 3G shows representative images of kidney cross-sections obtained after anti-GFP IHC. GFP expression was observed in the kidney in groups treated with AAV9.CAG.GFP by either ICV or IV administration. GFP expression was limited to tubules adjacent to glomeruli, suggesting expression specifically in epithelial cells representing the macula densa. In animals administered IVIG either 2 hours or 24 hours prior to AAV9.CAG.GFP ICV administration, no GFP expression was detected in the kidney, which was similar to saline injected control. Table 11 provides a summary of percentage of GFP⁺ kidney cells for each animal.

TABLE 11
Percentage of GFP⁺ Kidney Cells

| | | | | GFP % + | |
|---|---|---|---|---|---|
| Animal # | Vector Treatment | IVIG* | | Cells | −Control |
| MR-18-1 | Saline | — | | 0 | 0 |
| MR-18-2 | AAV9.CAG.GFP, ICV | — | | 0+ | 0 |
| MR-18-3 | AAV9.CAG.GFP, ICV | — | | 0 | 0 |
| MR-18-4 | AAV9.CAG.GFP, ICV | — | | 0+ | 0 |
| MR-18-5 | AAV9.CAG.GFP, ICV | — | | 0+ | 0 |
| MR-18-6 | AAV9.CAG.GFP, ICV | — | | 0+ | 0 |
| MR-18-7 | AAV9.CAG.GFP, ICV | 2 | h | 0 | 0 |
| MR-18-8 | AAV9.CAG.GFP, ICV | 2 | h | 0 | 0 |
| MR-18-9 | AAV9.CAG.GFP, ICV | 2 | h | 0 | 0 |
| MR-18-10 | AAV9.CAG.GFP, ICV | 2 | h | 0 | 0 |
| MR-18-11 | AAV9.CAG.GFP, ICV | 2 | h | 0 | 0 |
| MR-18-12 | AAV9.CAG.GFP, ICV | 24 | h | 0 | 0 |
| MR-18-13 | AAV9.CAG.GFP, ICV | 24 | h | 0 | 0 |
| MR-18-14 | AAV9.CAG.GFP, ICV | 24 | h | 0 | 0 |
| MR-18-15 | AAV9.CAG.GFP, ICV | 24 | h | 0 | 0 |
| MR-18-16 | AAV9.CAG.GFP, ICV | 24 | h | 0 | 0 |

| | | | | |
|---|---|---|---|---|
| MR-18-17 | AAV9.CAG.GFP, IV | — | 0+ | 0 |
| MR-18-18 | AAV9.CAG.GFP, IV | — | 0+ | 0 |
| MR-18-19 | AAV9.CAG.GFP, IV | — | 0+ | 0 |

*MR-18-7 to MR-18-16 had positive NAb responses and MR-18-2 to MR-18-6 and MR-18-17 to MR-18-19 had negative NAb responses.

[0250] 6.5.1.7. Conclusion

[0251] This experiment was designed to test the hypothesis that systemic IVIG administration prior to ICV administration of AAV9.CAG.GFP limits transduction of peripheral organs by AAV9.CAG.GFP that has escaped the CNS.

[0252] Vector genomes were observed in the liver, heart, and kidney in groups treated with AAV9.CAG.GFP by either ICV or IV administration. The presence of vector genomes in peripheral organs suggests that AAV is adept at escaping the CNS after ICV injection. Compared to animals that were only dosed with ICV, animals that were treated with IVIG prior to ICV dosing of AAV showed significantly reduced transduction and expression in the liver, heart, and kidney. While the spleen showed an increase in vector genomes in animals pre-treated with IVIG, this is likely due to engulfment of antibody-bound capsid by circulating phagocytic cells rather than bona fide transduction. In support of this, GFP expression data (IHC or RT-ddPCR) showed no significant change between groups administered IVIG and those that were dosed with AAV without IVIG administration. Overall, administration of IVIG prior to AAV ICV administration limited AAV transduction in peripheral tissues, including liver, heart, and kidney.

### 7. INCORPORATION BY REFERENCE

[0253] All publications, patents, patent applications and other documents cited in this application are hereby incorporated by reference in their entireties for all purposes to the same extent as if each individual publication, patent, patent application or other document were individually indicated to be incorporated by reference for all purposes.

### 8. EQUIVALENTS

[0254] While various specific embodiments have been illustrated and described, the above specification is not restrictive. It will be appreciated that various changes can be made without departing from the spirit and scope of the invention(s). Many variations will become apparent to those skilled in the art upon review of this specification.

SEQUENCE APPENDIX

| | For Anc library sequences (Anc80; Anc81; Anc82; Anc83; |
|---|---|
| | Anc84; Anc94; Anc110; Anc113; Anc126; and Anc127), X |
| SEQ ID | can be any one of the amino acids listed below for |
| NO | each toggle site site |
| SEQ ID | MAADGYLPDWLEDNLSEGIREWWDLKPGAPKPKANQQKQDDGRGLVLPGYKYLGPFNGLDK |
| NO: 54 | GEPVNAADAAALEHDKAYDQQLKAGDNPYLRYNHADAEFQERLQEDTSFGGNLGRAVFQAKK |
| (AAV1 | RVLEPLGLVEEGAKTAPGKKRPVEQSPQEPDSSSGIGKTGQQPAKKRLNFGQTGDSESVPDPQPL |
| (AAD277 | GEPPATPAAVGPTTMASGGGAPMADNNEGADGVGNASGNWHCDSTWLGDRVITTSTRTWA |
| 57)) | LPTYNNHLYKQISSASTGASNDNHYFGYSTPWGYFDFNRFHCHFSPRDWQRLINNNWGFRPKR |
| | LNFKLFNIQVKEVTTNDGVTTIANNLTSTVQVFSDSEYQLPYVLGSAHQGCLPPFPADVFMIPQY |
| | GYLTLNNGSQAVGRSSFYCLEYFPSQMLRTGNNFTFSYTFEEVPFHSSYAHSQSLDRLMNPLIDQ |
| | YLYYLNRTQNQSGSAQNKDLLFSRGSPAGMSVQPKNWLPGPCYRQQRVSKTKTDNNNSNFTW |
| | TGASKYNLNGRESIINPGTAMASHKDDEDKFFPMSGVMIFGKESAGASNTALDNVMITDEEEIK |
| | ATNPVATERFGTVAVNFQSSSTDPATGDVHAMGALPGMVWQDRDVYLQGPIWAKIPHTDGH |
| | FHPSPLMGGFGLKNPPPQILIKNTPVPANPPAEFSATKFASFITQYSTGQVSVEIEWELQKENSKR |
| | WNPEVQYTSNYAKSANVDFTVDNNGLYTEPRPIGTRYLTRPL |
| SEQ ID | MAADGYLPDWLEDTLSEGIRQWWKLKPGPPPPKPAERHKDDSRGLVLPGYKYLGPFNGLDKGE |
| NO: 55 | PVNEADAAALEHDKAYDRQLDSGDNPYLKYNHADAEFQERLKEDTSFGGNLGRAVFQAKKRVL |
| (AAV2 | EPLGLVEEPVKTAPGKKRPVEHSPVEPDSSSGTGKAGQQPARKRLNFGQTGDADSVPDPQPLG |
| (AAC037 | QPPAAPSGLGTNTMATGSGAPMADNNEGADGVGNSSGNWHCDSTWMGDRVITTSTRTWAL |
| 80)) | PTYNNHLYKQISSQSGASNDNHYFGYSTPWGYFDFNRFHCHFSPRDWQRLINNNWGFRPKRLN |
| | FKLFNIQVKEVTQNDGTTTIANNLTSTVQVFTDSEYQLPYVLGSAHQGCLPPFPADVFMVPQYGY |
| | LTLNNGSQAVGRSSFYCLEYFPSQMLRTGNNFTFSYTFEDVPFHSSYAHSQSLDRLMNPLIDQYLY |
| | YLSRTNTPSGTTTQSRLQFSQAGASDIRDQSRNWLPGPCYRQQRVSKTSADNNNSEYSWTGAT |
| | KYHLNGRDSLVNPGPAMASHKDDEEKFFPQSGVLIFGKQGSEKTNVDIEKVMITDEEEIRTTNPV |
| | ATEQYGSVSTNLQRGNRQAATADVNTQGVLPGMVWQDRDVYLQGPIWAKIPHTDGHFHPSP |
| | LMGGFGLKHPPPQILIKNTPVPANPSTTFSAAKFASFITQYSTGQVSVEIEWELQKENSKRWNPEI |
| | QYTSNYNKSVNVDFTVDTNGVYSEPRPIGTRYLTRNL |
| SEQ ID | MAADGYLPDWLEDNLSEGIREWWALKPGVPQPKANQQHQDNRRGLVLPGYKYLGPGNGLDK |
| NO: 56 | GEPVNEADAAALEHDKAYDQQLKAGDNPYLKYNHADAEFQERLQEDTSFGGNLGRAVFQAKK |
| (AAV3 | RILEPLGLVEEAAKTAPGKKGAVDQSPQEPDSSSGVGKSGKQPARKRLNFGQTGDSESVPDPQPL |
| (AAC550 | GEPPAAPTSLGSNTMASGGGAPMADNNEGADGVGNSSGNWHCDSQWLGDRVITTSTRTWA |
| 49)) | LPTYNNHLYKQISSQSGASNDNHYFGYSTPWGYFDFNRFHCHFSPRDWQRLINNNWGFRPKKL |
| | SFKLFNIQVRGVTQNDGTTTIANNLTSTVQVFTDSEYQLPYVLGSAHQGCLPPFPADVFMVPQY |
| | GYLTLNNGSQAVGRSSFYCLEYFPSQMLRTGNNFQFSYTFEDVPFHSSYAHSQSLDRLMNPLIDQ |
| | YLYYLNRTQGTTSGTTNQSRLLFSQAGPQSMSLQARNWLPGPCYRQQRLSKTANDNNNSNFP |
| | WTAASKYHLNGRDSLVNPGPAMASHKDDEEKFFPMHGNLIFGKEGTTASNAELDNVMITDEEE |
| | IRTTNPVATEQYGTVANNLQSSNTAPTTGTVNHQGALPGMVWQDRDVYLQGPIWAKIPHTDG |
| | HFHPSPLMGGFGLKHPPPQIMIKNTPVPANPPTTFSPAKFASFITQYSTGQVSVEIEWELQKENS |
| | KRWNPEIQYTSNYNKSVNVDFTVDTNGVYSEPRPIGTRYLTRNL |
| SEQ ID | MSFVDHPPDWLEEVGEGLREFLGLEAGPPKPKPNQQHQDQARGLVLPGYNYLGPGNGLDRGE |
| NO: 57 | PVNRADEVAREHDISYNEQLEAGDNPYLKYNHADAEFQEKLADDTSFGGNLGKAVFQAKKRVLE |
| (AAV5 | PFGLVEEGAKTAPTGKRIDDHFPKRKKARTEEDSKPSTSSDAEAGPSGSQQLQIPAQPASSLGADT |
| (AAD137 | MSAGGGGPLGDNNQGADGVGNASGDWHCDSTWMGDRVVTKSTRTWVLPSYNNHQYREIK |
| 56)) | SGSVDGSNANAYFGYSTPWGYFDFNRFHSHWSPRDWQRLINNYWGFRPRSLRVKIFNIQVKEV |
| | TVQDSTTTIANNLTSTVQVFTDDDYQLPYVVGNGTEGCLPAFPPQVFTLPQYGYATLNRDNTEN |
| | PTERSSFFCLEYFPSKMLRTGNNFEFTYNFEEVPFHSSFAPSQNLFKLANPLVDQYLYRFVSTNNT |
| | GGVQFNKNLAGRYANTYKNWFPGPMGRTQGWNLGSGVNRASVSAFATTNRMELEGASYQV |
| | PPQPNGMTNNLQGSNTYALENTMIFNSQPANPGTTATYLEGNMLITSESETQPVNRVAYNVGG |
| | QMATNNQSSTTAPATGTYNLQEIVPGSVWMERDVYLQGPIWAKIPETGAHFHPSPAMGGFGL |
| | KHPPPMMLIKNTPVPGNITSFSDVPVSSFITQYSTGQVTVEMEWELKKENSKRWNPEIQYTNNY |
| | NDPQFVDFAPDSTGEYRTTRPIGTRYLTRPL |
| SEQ ID | MAADGYLPDWLEDNLSEGIREWWDLKPGAPKPKANQQKQDDGRGLVLPGYKYLGPFNGLDK |
| NO: 58 | GEPVNAADAAALEHDKAYDQQLKAGDNPYLRYNHADAEFQERLQEDTSFGGNLGRAVFQAKK |
| (AAV6 | RVLEPFGLVEEGAKTAPGKKRPVEQSPQEPDSSSGIGKTGQQPAKKRLNFGQTGDSESVPDPQPL |
| (AAB954 | GEPPATPAAVGPTTMASGGGAPMADNNEGADGVGNASGNWHCDSTWLGDRVITTSTRTWA |
| 50)) | LPTYNNHLYKQISSASTGASNDNHYFGYSTPWGYFDFNRFHCHFSPRDWQRLINNNWGFRPKR |
| | LNFKLFNIQVKEVTTNDGVTTIANNLTSTVQVFSDSEYQLPYVLGSAHQGCLPPFPADVFMIPQY |
| | GYLTLNNGSQAVGRSSFYCLEYFPSQMLRTGNNFTFSYTFEDVPFHSSYAHSQSLDRLMNPLIDQ |
| | YLYYLNRTQNQSGSAQNKDLLFSRGSPAGMSVQPKNWLPGPCYRQQRVSKTKTDNNNSNFTW |
| | TGASKYNLNGRESIINPGTAMASHKDDKDKFFPMSGVMIFGKESAGASNTALDNVMITDEEEIK |
| | ATNPVATERFGTVAVNLQSSSTDPATGDVHVMGALPGMVWQDRDVYLQGPIWAKIPHTDGH |
| | FHPSPLMGGFGLKHPPPQILIKNTPVPANPPAEFSATKFASFITQYSTGQVSVEIEWELQKENSKR |
| | WNPEVQYTSNYAKSANVDFTVDNNGLYTEPRPIGTRYLTRPL |
| SEQ ID | MAADGYLPDWLEDNLSEGIREWWDLKPGAPKPKANQQKQDNGRGLVLPGYKYLGPFNGLDK |
| NO: 59 | GEPVNAADAAALEHDKAYDQQLKAGDNPYLRYNHADAEFQERLQEDTSFGGNLGRAVFQAKK |
| (AAV7 | RVLEPLGLVEEGAKTAPAKKRPVEPSPQRSPDSSTGIGKKGQQPARKRLNFGQTGDSESVPDPQP |
| (AF51385 | LGEPPAAPSSVGSGTVAAGGGAPMADNNEGADGVGNASGNWHCDSTWLGDRVITTSTRTW |
| 1_2)) | ALPTYNNHLYKQISSETAGSTNDNTYFGYSTPWGYFDFNRFHCHFSPRDWQRLINNNWGFRPK |
| | KLRFKLFNIQVKEVTTNDGVTTIANNLTSTIQVFSDSEYQLPYVLGSAHQGCLPPFPADVFMIPQY |
| | GYLTLNNGSQSVGRSSFYCLEYFPSQMLRTGNNFEFSYSFEDVPFHSSYAHSQSLDRLMNPLIDQ |
| | YLYYLARTQSNPGGTAGNRELQFYQGGPSTMAEQAKNWLPGPCFRQQRVSKTLDQNNNSNFA |
| | WTGATKYHLNGRNSLVNPGVAMATHKDDEDRFFPSSGVLIFGKTGATNKTTLENVLMTNEEEIR |
| | PTNPVATEEYGIVSSNLQAANTAAQTQVVNNQGALPGMVWQNRDVYLQGPIWAKIPHTDGN |
| | FHPSPLMGGFGLKHPPPQILIKNTPVPANPPEVFTPAKFASFITQYSTGQVSVEIEWELQKENSKR |
| | WNPEIQYTSNFEKQTGVDFAVDSQGVYSEPRPIGTRYLTRNL |
| SEQ ID | MAADGYLPDWLEDNLSEGIREWWALKPGAPKPKANQQKQDDGRGLVLPGYKYLGPFNGLDK |
| NO: 60 | GEPVNAADAAALEHDKAYDQQLQAGDNPYLRYNHADAEFQERLQEDTSFGGNLGRAVFQAKK |
| (AAV8 | RVLEPLGLVEEGAKTAPGKKRPVEPSPQRSPDSSTGIGKKGQQPARKRLNFGQTGDSESVPDPQP |
| (AF51385 | LGEPPAAPSGVGPNTMAAGGGAPMADNNEGADGVGSSSGNWHCDSTWLGDRVITTSTRTW |
| 2_2)) | ALPTYNNHLYKQISNGTSGGATNDNTYFGYSTPWGYFDFNRFHCHFSPRDWQRLINNNWGFRP |
| | KRLSFKLFNIQVKEVTQNEGTKTIANNLTSTIQVFTDSEYQLPYVLGSAHQGCLPPFPADVFMIPQ |
| | YGYLTLNNGSQAVGRSSFYCLEYFPSQMLRTGNNFQFTYTFEDVPFHSSYAHSQSLDRLMNPLID |
| | QYLYYLSRTQTTGGTANTQTLGFSQGGPNTMANQAKNWLPGPCYRQQRVSTTTGQNNNSNF |
| | AWTAGTKYHLNGRNSLANPGIAMATHKDDEERFFPSNGILIFGKQNAARDNADYSDVMLTSEE |
| | EIKTTNPVATEEYGIVADNLQQQNTAPQIGTVNSQGALPGMVWQNRDVYLQGPIWAKIPHTD |
| | GNFHPSPLMGGFGLKHPPPQILIKNTPVPADPPTTFNQSKLNSFITQYSTGQVSVEIEWELQKENS |
| | KRWNPEIQYTSNYYKSTSVDFAVNTEGVYSEPRPIGTRYLTRNL |
| SEQ ID | MAADGYLPDWLEDNLSEGIREWWALKPGAPQPKANQQHQDNARGLVLPGYKYLGPGNGLDK |
| NO: 61 | GEPVNAADAAALEHDKAYDQQLKAGDNPYLKYNHADAEFQERLKEDTSFGGNLGRAVFQAKKR |
| (AAV9 | LLEPLGLVEEAAKTAPGKKRPVEQSPQEPDSSAGIGKSGAQPAKKRLNFGQTGDTESVPDPQPIG |
| (AAS9926 | EPPAAPSGVGSLTMASGGGAPVADNNEGADGVGSSSGNWHCDSQWLGDRVITTSTRTWALP |
| 4)) | TYNNHLYKQISNSTSGGSSNDNAYFGYSTPWGYFDFNRFHCHFSPRDWQRLINNNWGFRPKRL |
| | NFKLFNIQVKEVTDNNGVKTIANNLTSTVQVFTDSDYQLPYVLGSAHEGCLPPFPADVFMIPQYG |
| | YLTLNDGSQAVGRSSFYCLEYFPSQMLRTGNNFQFSYEFENVPFHSSYAHSQSLDRLMNPLIDQY |
| | LYYLSKTINGSGQNQQTLKFSVAGPSNMAVQGRNYIPGPSYRQQRVSTTVTQNNNSEFAWPGA |
| | SSWALNGRNSLMNPGPAMASHKEGEDRFFPLSGSLIFGKQGTGRDNVDADKVMITNEEEIKTT |
| | NPVATESYGQVATNHQSAQAQAQTGWVQNQGILPGMVWQDRDVYLQGPIWAKIPHTDGNF |
| | HPSPLMGGFGMKHPPPQILIKNTPVPADPPTAFNKDKLNSFITQYSTGQVSVEIEWELQKENSKR |
| | WNPEIQYTSNYYKSNNVEFAVNTEGVYSEPRPIGTRYLTRNL |
| SEQ ID | MAADGYLPDWLEDNLSEGIREWWDLKPGAPKPKANQQKQDDGRGLVLPGYKYLGPFNGLDK |
| NO: 62 | GEPVNAADAAALEHDKAYDQQLKAGDNPYLRYNHADAEFQERLQEDTSFGGNLGRAVFQAKK |
| (AAV10 | RVLEPLGLVEEAAKTAPGKKRPVEPSPQRSPDSSTGIGKKGQQPAKKRLNFGQTGESESVPDPQPI |
| (AAT4633 | GEPPAGPSGLGSGTMAAGGGAPMADNNEGADGVGSSSGNWHCDSTWLGDRVITTSTRTWA |
| 7)) | LPTYNNHLYKQISNGTSGGSTNDNTYFGYSTPWGYFDFNRFHCHFSPRDWQRLINNNWGFRPK |
| | RLSFKLFNIQVKEVTQNEGTKTIANNLTSTIQVFTDSEYQLPYVLGSAHQGCLPPFPADVFMIPQY |
| | GYLTLNNGSQAVGRSSFYCLEYFPSQMLRTGNNFEFSYTFEDVPFHSSYAHSQSLDRLMNPLIDQ |
| | YLYYLSRTQSTGGTQGTQQLLFSQAGPANMSAQAKNWLPGPCYRQQRVSTTLSQNNNSNFAW |
| | TGATKYHLNGRDSLVNPGVAMATHKDDEERFFPSSGVLMFGKQGAGRDNVDYSSVMLTSEEEI |
| | KTTNPVATEQYGVVADNLQQANTGPIVGNVNSQGALPGMVWQNRDVYLQGPIWAKIPHTDG |
| | NFHPSPLMGGFGLKHPPPQILIKNTPVPADPPTTFSQAKLASFITQYSTGQVSVEIEWELQKENSK |
| | RWNPEIQYTSNYYKSTNVDFAVNTEGTYSEPRPIGTRYLTRNL |
| SEQ ID | MAADGYLPDWLEDNLSEGIREWWALKPGAPQPKANQQHQDNARGLVLPGYKYLGPGNGLDK |
| NO: 63 | GEPVNEADAAALEHDKAYDQQLKAGDNPYLKYNHADAEFQERLKEDTSFGGNLGRAVFQAKKR |
| (AAV | LLEPLGLVEEAAKTAPGKKRPVEQSPQEPDSSVGIGKSGAQPAKKRLNFGQTGDTESVPDPQPIG |
| hu.68) | EPPAAPSGVGSLTMASGGGAPVADNNEGADGVGSSSGNWHCDSQWLGDRVITTSTRTWALP |
| | TYNNHLYKQISNSTSGGSSNDNAYFGYSTPWGYFDFNRFHCHFSPRDWQRLINNNWGFRPKRL |
| | NFKLFNIQVKEVTDNNGVKTIANNLTSTVQVFTDSDYQLPYVLGSAHEGCLPPFPADVFMIPQYG |
| | YLTLNDGSQAVGRSSFYCLEYFPSQMLRTGNNFQFSYEFENVPFHSSYAHSQSLDRLMNPLIDQY |
| | LYYLSKTINGSGQNQQTLKFSVAGPSNMAVQGRNYIPGPSYRQQRVSTTVTQNNNSEFAWPGA |
| | SSWALNGRNSLMNPGPAMASHKEGEDRFFPLSGSLIFGKQGTGRDNVDADKVMITNEEEIKTT |
| | NPVATESYGQVATNHQSAQAQAQTGWVQNQGILPGMVWQDRDVYLQGPIWAKIPHTDGNF |
| | HPSPLMGGFGMKHPPPQILIKNTPVPADPPTAFNKDKLNSFITQYSTGQVSVEIEWELQKENSKR |
| | WNPEIQYTSNYYKSNNVEFAVNTEGVYSEPRPIGTRYLTRNL* |
| SEQ ID | MAADGYLPDWLEDNLSEGIREWWALQPGAPKPKANQQHQDNARGLVLPGYKYLGPGNGLDK |
| NO: 64 | GEPVNAADAAALEHDKAYDQQLKAGDNPYLKYNHADAEFQERLKEDTSFGGNLGRAVFQAKKR |
| (AAV | LLEPLGLVEEAAKTAPGKKRPVDQSPQEPDSSSGVGKSGKQPARKRLNFGQTGDSESVPDPQPL |
| LK03) | GEPPAAPTSLGSNTMASGGGAPMADNNEGADGVGNSSGNWHCDSQWLGDRVITTSTRTWA |
| | LPTYNNHLYKQISSQSGASNDNHYFGYSTPWGYFDFNRFHCHFSPRDWQRLINNNWGFRPKKL |
| | SFKLFNIQVKEVTQNDGTTTIANNLTSTVQVFTDSEYQLPYVLGSAHQGCLPPFPADVFMVPQYG |
| | YLTLNNGSQAVGRSSFYCLEYFPSQMLRTGNNFQFSYTFEDVPFHSSYAHSQSLDRLMNPLIDQY |
| | LYYLNRTQGTTSGTTNQSRLLFSQAGPQSMSLQARNWLPGPCYRQQRLSKTANDNNNSNFPW |
| | TAASKYHLNGRDSLVNPGPAMASHKDDEEKFFPMHGNLIFGKEGTTASNAELDNVMITDEEEIR |
| | TTNPVATEQYGTVANNLQSSNTAPTTRTVNDQGALPGMVWQDRDVYLQGPIWAKIPHTDGHF |
| | HPSPLMGGFGLKHPPPQIMIKNTPVPANPPTTFSPAKFASFITQYSTGQVSVEIEWELQKENSKR |
| | WNPEIQYTSNYNKSVNVDFTVDTNGVYSEPRPIGTRYLTRPL* |
| SEQ ID | MAADGYLPDWLEDTLSEGIRQWWKLKPGPPPPKPAERHKDDSRGLVLPGYKYLGPFNGLDKGE |
| NO: 65 | PVNEADAAALEHDKAYDRQLDSGDNPYLKYNHADAEFQERLKEDTSFGGNLGRAVFQAKKRVL |
| (AAV | EPLGLVEEPVKTAPGKKRPVEHSPVEPDSSSGTGKAGQQPARKRLNFGQTGDADSVPDPQPLG |
| hu.1 | QPPAAPSGLGSTTMATGSGAPMADNNEGADGVGNSSGNWHCDSQWLGDRVITTSTRTWAL |
| (AAS9926 | PTYNNHLYKQISSQSGASNDNHYFGYSTPWGYFDFNRFHCHFSPRDWQRLINNNWGFRPKRLN |
| 0)) | FKLFNIQVKEVTQNGGTTTIANNLTSTVQVFTDSEYQLPYVLGSAHQGCLPPFPADVFMVPQYGY |
| | LTLNNGSQAVGRSSFYCLEYFPSQMLRTGNNFQFSYTFEDVPFHSSYAHSQSLDRLMNPLIDQYL |
| | YYLNKTQTNSGTLQQSRLLFSQAGPTNMSLQAKNWLPGPCYRQQRLSKQANGNNNSNFPWTA |
| | ATKYHLNGRDSLVNPGPAMASHKDDEEKFFPMHGTLIFGKQGTNANDADLENVMITDEEEIRA |
| | TNPVATEQYGTVSNNLQNSNTGPTTGTVNHQGALPGMVWQDRDVYLQGPIWAKIPHTDGHF |
| | HPSPLTGGFGLKHPPPQIMIKNTPVPANPPTNFSSAKFASFITQYSTGQVSVEIEWELQKENSKR |
| | WNPEIQYTSNYNKSVNVDFTVDTNGVYSEPRPIGTRYLTRNL |
| SEQ ID | MAADGYPPDWLEDTLSEGIRQWWKLKPGPPPPKPAERHKDDSRGLVLPGYKYLGPFNGLDKGE |
| NO: 66 | PVNEADAAALEHDKAYDRQLDSGDNPYLKYNHADAEFQERLKEDTSFGGNLGRAVFQAKKRVL |
| (AAV | EPLGLVEEPVKTAPGKKRPVEHSPVEPDSSSGTGKAGQRPARKRLNFGQTGDADSVPDPQPLGQ |
| hu.2 | PPAAPSGLGSTTMATGSGAPMADNNEGADGVGNSSGNWHCDSQWLGDRVITTSTRTWALPT |
| (AAS9927 | YNNHLYKQISSQSGASNDNHYFGYSTPWGYFDFNRFHCHFSPRDWQRLINNNWGFRPKRLNFK |
| 0)) | LFNIQVKEVTQNDGTTTIANNLTSTVQVFTDSEYQLPYVLGSAHQGCLPPFPADVFMVPQYGYLT |
| | LNNGSQAVGRSSFYCLEYFPSQMLRTGNNFQFSYTFEDVPFHSSYAHSQSLDRLMNPLIDQYLYY |
| | LNKTQTNSGTLQQSRLLFSQAGPTNMSLQAKNWLPGPCYRQQRLSKQANDNNNSNFPWTAA |
| | TKYHLNGRDSLVNPGPAMASHKDDEEKFFPMHGTLIFGKQGTNANDADLENVMITDEEEIRAT |
| | NPVATEQYGTVSNNLQNSNTGPTTGTVNRQGALPGMVWQDRDVYLQGPIWAKIPHTDGHFH |
| | PSPLMGGFGLKHPPPQIMIKNTPVPANPPTNFSSAKFASFITQYSTGQVSVEIEWELQKENSKRW |
| | NPEIQYTSNYNKSVNVDFTVDTNGVYSEPRPIGTRYLTRNL |
| SEQ ID | MAADGYLPDWLEDTLSEGIRQWWKLKPGPPPPKPAERHKDDSRGLVLPGYKYLGPFNGLDKGE |
| NO: 67 | PVNEADAAALEHDKAYDRQLDSGDNPYLKYNHADAEFQERLKEDTSFGGNLGRAVFQAKKRVL |
| (AAV | EPLRPGLRKPVKTAPGKKRPVEHSPVEPDSSSGTGKAGQQPARKRLNFGQTGDADSVPDPQPLG |
| hu.3 | QPPAAPSGLGSTTMATGSGAPMADNNEGADGVGNSSGNWHCDSQWLDDRVIATSTRTWAL |
| (AAS9928 | PTYNNHLYKQISSQSGACNDNHYFGYSTPWGYFDFNRFHCHFSPRDWQRLINSNWGFRPKRLN |
| 0)) | FKLFNIQVKEVTQNDGTTTIANNLTSTVQVFTDSEYQLPYVPGSAHQGCLPPFPADVFMVPQYG |
| | YLTLNNGSQAVGRSSFYCLEYFPSQMLRTGNNFQFSYTFEDVPFHSSYAHCQSLDRLMNPLIDQY |
| | LYYLNKTQTNSGTLQQSRLLFSQAGPTNMSLQAKNWLPGPCYRQQRLSKQANDNNNCNFPWT |
| | AATKYHLNGRDSLVNPGPAMASHKDDEEKFFPMHGTLIFGKQGTNANDADLENVMITDEEEIR |
| | PTNPVATEQYGTVSNNLQNSNTGPTTGTVNHQGALPGMVWQDRDVYLQGPIWAKIPHTDGH |
| | FHPSPLMGGFGLKHPPPQIMIKSTPVPANPPTNFSSAKFASSITQYSTGQVSVEIEWELQKENSKR |
| | WNPEIQYTSNYNKSVNVDFTVDTNGVYSEPRPIGTRYLTRNL |
| SEQ ID | MAADGYLPDWLEDTLSEGIRQWWKLKPGPPPPKPAERHKDDSRGLVLPGYKYLGPFNGLDKGE |
| NO: 68 | PVNEADAAALEHDKAYDRQLDSGDNPYLKYNHADAEFQERLKEDTSFGGNLGRAVFQAKKRVL |
| (AAV | EPLGLVEEPVKTAPGKKRPVEHSPVEPDSSSGTGKAGQQPARKRLNFGQTGDADSVPDPQPLG |
| hu.4 | QPPAAPSGLGSTTMATGSGAPMADNNEGADGVGNSSGNWHCDSQWLGDRVITTSTRTWAL |
| (AAS9928 | PTYNNHLYKQISSQSGASNDNHYFGYSTPWGYFDFNRFHCHFSPRDWQRLVNNNRGFRPKRLN |
| 7)) | FKLFNIQVKEVTQNDGTTTIANNLTSTVQVFTDSEYQLPYVLGSAHQGCLPPFPADVFMVPQYGY |
| | LTLNNGSQAVGRSSFYCLEYFPSQMLRTGNNFQFSYTFEDVPFHSSYAHSQSLDRLMNPLIDQYL |
| | YYLNKTQTNSGTLQQSRLLFSQAGPTNMSLQAKNWLPGPCYRQQRLSKQANDNNNSNFPWTA |
| | ATKYHLNGRDSLVNPGPAMASHKDDEEKFFPMHGTLIFGKQGTNANDADLENVMITDEEEIRA |
| | TNPVATEQYGTVSNNLQNSNTGPTTGTVNHQGALPGMVWQDRDVYLQGPIWAKIPHTDGHF |
| | HPSPLMGGFGLKHPPPQIMIKNTPVPANPPTNFSSAKFASFITQYSTGQVSVEIEWELQKENSKR |
| | WNPEIQYTSNYNKSVNVDFTVDTNGVYSEPRPIGTRYLTRNL |
| SEQ ID | MAADGYLPDWLEDNLSEGIREWWDLKPGAPKPKANQQKQDDGRGLVLPGYKYLGPFNGLDK |
| NO: 69 | GEPVNAADAAALEHDKAYDQQLKAGDNPYLRYNHADAEFQERLQEDTSFGGNLGRAVFQAKK |
| (AAV | RVLEPLGLVEEGAKTAPGKKRPVEPSPQRSPDSSTGIGKTGQQPAKKRLNFGQTGDSESVPDPQP |
| hu.6 | IGEPPAGPSGLGSGTMAAGGGAPMADNNEGADGVGSSSGNWHCDSAWLGDRVITTSTRPW |
| (AAS9930 | ALPTYNNHLYKQISNGTSGGSTNDNTYFGYSTPWGYFDFNRFHCHFSPRDWQRLINNNWGFRP |
| 6)) | KRLNFKLFNIQVKEVTQNEGTKTIANNLTSTIQVFTDSEYQLPYVLGSAHQGCPPPFPADVFMIPQ |
| | YGYLTLNNGSQAVGRSSFYCLEYFPSQMRRTGNNFEFSYQFEDVPFHSSYAHSQSLDRLMNPLID |
| | QYLYYLSRTQSTGGTAGTQQLLFSQAGPNNMSAQAKNWLPGPCYRQQRVSTTLSQNNNSNFA |
| | WTGATKYHLNGRDSLVNPGVAMATHKDDEERFFPSSGVLMFGKQGAGKDNVDYSSVMLTSEE |
| | EIKTTNPVATEQYGVVADNLQQQNAAPIVGAVNSQGALPGMVWQNRDVYLQGPIWAKIPHT |
| | DGNFHPSPLMGGFGLKHPPPQILIKNTPVPADPPTTFSQAKLASFITQYSTGQVSVEIEWELQKEN |
| | SKRWNPEIQYTSNYYKSTNVDFAVNTEGTYSEPRPIGTRYLTRNL |
| SEQ ID | MAADGYLPDWLEDTLSEGIRQWWKLKPGPPPPKPAERHKDDSRGLVLPGYKYLGPFNGLDKGE |
| NO: 70 | PVNEADAAALEHDKAYDRQLDSGDNPYLKYNHADAEFQERLKEDTSFGGNLGRAVFQAKKRVL |
| (AAV | EPLGLVEGPVKTAPGKKRPVEHSPAEPDSSSGTGKAGQQPARKRLNFGQTGDADSVPDPQPLG |
| hu.7 | QPPAAPSGLGSTTMATGSGAPMADNNEGADGVGNSSGNWHCDSQWLGDRVITTSTRTWAL |
| (AAS9931 | PTYNNHLYKQISSQSGASNDNHYFGYSTPWGYFDFNRFHCHFSPRDWQRLINNNWGFRPKRLN |
| 3)) | FKLFNIQVKEVTQNDGTTTIANNLTSTVQVFTDSEYQLPYVLGSAHQGCLPPFPADVFMVPQYGY |
| | LTLNNGSQAVGRSSFYCLEYFPSQMLRTGNNFQFSYTFEDVPFHSSYAHSQSLDRLMNPLIDQYL |
| | YYLNKTQSNSGTLQQSRLLFSQAGPTSMSLQAKNWLPGPCYRQQRLSKQANDNNNSNFPWTA |
| | ATKYHLNGRDSLVNPGPAMASHKDDEEKFFPMHGTLIFGKQGTNANDADLDNVMITDEEEIRT |
| | TNPVATEQYGYVSNNLQNSNTGPTTGTVNHQGALPGMVWQDRDVYLQGPIWAKIPHTDGHF |
| | HPSPLMGGFGLKHPPPQIMIKNTPVPANPPTNFSSAKFASFITQYSTGQVSVEIEWELQKENSKR |
| | WNPEIQYTSNYNKSVNVDFTVDTNGVYSEPRPIGTRYLTRNL |
| SEQ ID | MAADGYLPDWLEDTLSEGIRQWWKLKPGPPPPKPAERHQDNSRGLVLPGYKYLGPSNGLDKGE |
| NO: 71 | PVNEADAAALEHDKAYDRQLDSGDNPYLKYNHADAEFQERLKEDTSFGGNLGRAVFQAKKRVL |
| (AAV | EPLGLVEEPVKTAPGKKRPVEHSPVEPDSSSGTGKAGHQPARKRLNFGQTGDADSVPDPQPLGQ |
| hu.9 | PPAAPTSLGSTTMATGSGAPMADNNEGADGVGNSSGNWHCDSQWLGDRVITTSTRTWALPT |
| (AAS9931 | YNNHLYKQISSQSGASNDNHYFGCSTPWGYFDFNRFHCHFSPRDWQRLINNNWGFRPKRLNFK |
| 4)) | LFNIQVKEVTQNDGTTTIANNLTSTVQVFTDSEYPLPYVLGSAHQGCLPPFPADVFMVPQYGYLT |
| | LNNGSQAVGRSSFYCLEYFPSQMLRTGNNFTFSYTFEDVPFHSSYAHSQSLDRLMNPLIDQYLYYL |
| | NRTQSNSGTLQQSRLLFSQAGPTSMSLQAKNWLPGPCYRQQRLSKQANDNNNSNFPWTAATK |
| | YHLNGRDSLVNPGPAMASHKDDEEKFFPMHGTLIFGKQGTNANDADLEHVMITDEEEIRTTNP |
| | VATEQYGNVSNNLQNSNTGPTTENVNHQGALPGMVWQDRDVYLQGPIWAKIPHTDGHFHPS |
| | PLMGGFGLKHPPPQIMIKNTPVPANPPTNFSSAKFASFITQYSTGQVSVEIEWELQKENSKRWN |
| | PEIQYTSNYNKSVNVDFTVDTNGVYSEPCPIGTRYLTRNL |
| SEQ ID | MAADGYLPDWLEDTLSEGIRQWWKLKPGPPPPKLAERHQDDSRGLVLPGYKYLGPFNGLDKGE |
| NO: 72 | PVNEADAAALEHDKAYDRQLDSGDNPYLKYNHADAEFQERLKEDTSFGGNLGRAVFQAKKRVL |
| (AAV | EPLGLVEEPVKTAPGKKRPVEHSPVEPDSSSGTGKAGHQPARKRLNFGQTGDADSVPDPQPLGQ |
| hu.10 | PPAAPTSLGSTTMATGSGAPMADNNEGADGVGNSSGNWHCDSQWLGDRVITTSTRTWALPT |
| (AAS9926 | YNNHLYKQISSQSGASNDNHYFGYSTPWGYFDFNRFHCHFSPRDWQRLINNNWGFRPKRLNFK |
| 1)) | LFNIQVKEVTQNDGTTTIANNLTSTVQVFTDSEYQLPYVLGSAHQGCLPPFPADVFTVPQYGYLTL |
| | NNGSQAVGRSSFYCLEYFPSQMLRTGNNLTFSYTFEDVPFHSSYAHSQSLDRLMNPLIDQYLYYL |
| | NRTQSNSGTLQQSRLLFSQAGPTSMSLQAKNWLPGPCYRQQRLSKQANDNNNSNFPWTAATK |
| | YHLNGRDSLVNPGPAMASHKDDEEKFFPMHGTLIFGKQGTNANDADLEHVMITDEEEIRTTNP |
| | VATEQYGNVSNNLQNSNTGPTTENVNHQGALPGMVWQDRDVYLQGPIWAKIPHTDGHFHPS |
| | PLMGGFGLKHPPPQIMIKNTPVPANPPTNYSSAKFASFITQYSTGQVSVEIEWELRKENSKRWNP |
| | EIQYTSNYNKSVNVDFTVDTNGVYSEPRPIGTRYLTRNL |
| SEQ ID | MAADGYLPDWLEDTLSEGIRQWWKLKPGPPPPKPAERHQDDSRGLVLPGYKYLGPFNGLDKGE |
| NO: 73 | PVNEADAAALEHDKAYDRQLDSGDNPYLKYNHADAEFQERLKEDTSFGGNLGRAVFQAKKRVL |
| (AAV | EPLGLVEEPVKTAPGKKRPVEHSPVEPDSSSGTGKAGHQPARKRLNFGQTGDADSVPDPQPLGQ |
| hu.11 | PPAAPTSLGSTTMATGSGAPMADNNEGADGVGNSSGNWHCDSQWLGDRVITTSTRTWALPT |
| (AAS9926 | YNNHLYKQISSQSGASNDNHYFGYSTPWGYFDFNRFHCHFSPRDWQRLINNNWGFRPKRLNFK |
| 2)) | LFNIQVKEVTQNDGTTTIANNLTSTVQVFTDSEYQLPYVLGSAHQGCLPPFPADVFMVPQYGYLT |
| | LNNGSQAVGRSSFYCLEYFPSQMLRTGNNFTFSYTFEDVPFHSSYAHSQSLDRLMNPLIDQYLYYL |
| | NRTQSNSGTLQQSRLLFSQAGPTSMSLQAKNWLPGPCYRQQRLSKQANDNNNSNFPWTAATK |
| | YRLNGRDSLVNPGPAMASHKDDEEKFFPMHGTLIFGKQGTNANDADLEHVMITDEEEIRTTNP |
| | VATEQYGNVSNNLQNSNTGPTTENVNHQGALPGMVWQDRDVYLQGPIWAKIPHTDGHFHPS |
| | PLMGGFGLKHPPPQIMIKNTPVPANPPTNFSSAKFASFITQYSTGQVSVEIEWELQKENSKRWN |
| | PEIQYTSNYNKSVNVDFTVDTNGVYSEPRPIGTRYLTRNL |
| SEQ ID | MAADGYLPDWLEDTLSEGIRQWWKLKPGPPPPKPAERHKDDSRGLVLPGYKYLGPFNGLYKGE |
| NO: 74 | PVDEADAAALEHDKAYDRQLDSGDNPYLKYNHADAEFQERLKEDTSFGGNLGRAVFQAKKRVL |
| (AAV | EPLGLVGEPVKTAPGKKRPVEHSPVEPDSSSGTGKAGNQPARKRLNFGQTGDADSVPDPQPLG |
| hu.15 | QPPAAPSGLGSTTMATGSGAPVADNNEGADGVGNSSGNWHCDSQWLGDRVITTSTRTWALP |
| (AAS9926 | TYNNHLYKQISSQSGASNDNHYFGYSTPWGYFDFNRFHCHFSPRDRQRLINNNWGFRPKRLNF |
| 5)) | KLFNIQVKEVTQNDGTTTIANNLTSTVQVFTDSGYQLPYVLGLAHQGCLPPFPADVFMVPQYGY |
| | LTLNNGSQAVGRSSFYCLEYFPSQMLRTGNNFQFSYTFEDVPFHSSYAHSQSLDRLMNPLIDQYL |
| | YYLNKTQSNSGTLQQSRLLFSQAGPTSMSLQAKNWLPGPCYRQQRLSKQANDNNNSNFPWTA |
| | ATKYHLNGRDSLVNPGPAMASHKDDEEKFFPMHGTLIFGKQGTNANDADLDNVMITDEEEIRT |
| | TNPVATEQYGYVSNNLQNSNTGPTTGTVNHQGALPGMVWQDRDVYLQGPIWAKIPHTDGHF |
| | HPSPLMGGFGLKHPPPQIMIKNTPVPANPPTNFSSAKFASFITQYSTGQVSVEIEWELQKEDSKR |
| | WNPEIQYTSNYNKPVNVDFTVDTNGVYSEPRPIGTRYLTRNL |
| SEQ ID | MAADGYLPDWLEDTLSEGIRQWWKLKPGPPPPKPAERHKDDSRGLVLPGYKYLGPFNGLYKGE |
| NO: 75 | PVNEADAAALEHDKAYDRQLDSGDNPYLKYNHAGAEFQERLKEDTSFGGNLGRAVFQAKKRVL |
| (AAV | EPLGLVEEPVKTAPGKKRPVEHSPVEPDSSSGTGKAGNQPARKRLNFGQTGDADSVPDPQPLGQ |
| hu.16 | PPAAPSGLGSTTMATGSGAPVADNNEGADGVGNSSGNWHCDSQWLGDRVITTSTRTWALPT |
| (AAS9926 | YNNHLYKQISSQSGASNDNHYFGYSTPWGYFDFNRFHCHFSPRDWQRLINNNWGFRPKRLNFK |
| 6)) | LFNIQVKEVTQNDGTTTIANNLTSTVQVFTDSEYQLPYVLGSAHQGCLPPFPADVFMVPQYGYLT |
| | LNNGSQAVGRSSFYCLEYFPSQMLRTGNNFQFSYTFEDVPFHSSYAHSQSLDRLMNPLIDQYLYY |
| | LNKTQSNSGTLQQSRLLFSQAGPTSMSLQAKNWLPGPCYRQQRLSKQANDNNNSNFPWTAAT |
| | KYHLNGRDSLVNPGPAMASHKDDEEKFFPMHGTLIFGKQGTNANDADLDNVMITDEEEIRTTN |
| | PVATEQYGYVSNNLQDSNTGPTTGTVNHQGALPGMVWQDRDVYLQGPIWAKIPHTDGHFHP |
| | SPLMGGFGLKHPPPQIMIKNTPVPANPPTNFSSAKFASFITQYSTGQVSVEIEWELQKENSKRWN |
| | PEIQYTSNYNKSVNVDFTVDTNGVYSEPRPIGTRYLTRNL |
| SEQ ID | MAADGYLPDWLEDNLSEGIREWWDLKPGAPKPKANQQKQDDGRGLVLPGCKYLGPFNGLDK |
| NO: 76 | GEPVNAADAAALEHDKAYDQQLKAGDNPYLRYNHADAEFQERLQEDTSFGGNLGRAVFQAKK |
| (AAV | RVLEPLGLVEEGAKTAPGKKRPVEPSPQRSPDSSTGIGKTGQQPAKKRLNFGQTGDSESVPDPQP |
| hu.17 | IGEPPAGPSGLGSGTMAAGGGAPMADNNEGADGVGSSSGNWHCDSTWLGDRVITTSTRTWA |
| (AAS9926 | LPTYNNHLYKQISNGTSGGSTNDNTYFGYSTPWGYFDFNRFHCHFSPRDWQRLINNNWGFRPK |
| 7)) | RLNFKLFNIQVKEVTQNEGTKTIANNLTSTIQVFTDSEYQLPYVLGSAHQGCPPPFPADVFMIPQY |
| | GYLTLNNGSQAVGRSSFYCLEYFPSQMRRTGNNFEFSYQFEDVPFHSSYAHSQSLDRLMNPLIDQ |
| | YLYYLSRTQSTGGTAGTQQLLFSQAGPNNMSAQAKNWLPGPCYRQQRVSTTLSQNNNSNFAW |
| | TGATKYHLNGRDSLVNPGVAMATHKDDEERFFPSSGVLMFGKQGAGKDNVDYSSVMLTSEEEI |
| | KTTNPVATEQYGVVADNLQQQNAAPIVGAVNSQGALPGMVWQNRDVYLQGPIWAKIPHTDG |
| | NFHPSPLMGGFGLKHPPPQILIKNTPVPADPPTTFSQAKLASFITQYSTGQVSVEIEWELQKENSK |
| | RWNPEIQYTSNYNKSVNVDFTVDTNGVYSEPRPIGTRYLTRNL |
| SEQ ID | MAADGYLPDWLEDTLSEGIRQWWKLKPGPPPPKPAERHKDDSRGLVLPGYKYLGPFNGLDKGE |
| NO: 77 | PVNEADAAALEHDKAYDRQLESGDNPYLKYNHADAEFQERLKEDTSFGGNLGRAVFQAKKRVLE |
| (AAV | PLGLVEEPVKTAPGKKRPVEHSPVEPDSSSGTGKAGQQPARKRLNFGQTGDADSVPDPQPLGQ |
| hu.18 | PPAAPSGLGSTTMASGSGAPVADNNEGADGVGNSSGNWHCDSQWLGDRVITTSTRTWALPT |
| (AAS9926 | YNNHLYKQISSQSGASNDNHYFGYSTPWGYFDFNRFHCHFSPRDWQRLINNSWGFRPKRLNFK |
| 8)) | LFNIQVKEVTQNDGTTTIANNLTSTVQVFTDSEYQLPYVLGSAHQGCLPPFPADVFMVPQYGYLT |
| | LNNGSQAVGRSSFYCLEYFPSQMLRTGNNFQFSYTFEDVPFHSSYAHSQSLDRLLNPLIDQYLYYL |
| | NKTQSNSGTLQQSRLLFSQAGPTSMSLQAKNWLPGPCYRQQRLSKQANDNNNSNFPWTAATK |
| | YHLNGRDSLVNPGPAMASHKDDEEKFFPMHGTLIFGKQGTNANDADLDNVMITDEEEIRTTNP |
| | VATEQYGYVSNNLQNSNTGPTTGTVNHQGALPGMVWQDRDVYLQGPIWAKIPHTDGHFHPS |
| | PLMGGFGLKHPPPQIMIKNTPVPANPPTNFSSSKFASFITQYSTGQVSVEIEWELQKENSKRWNP |
| | EIQYTSNYNKSVNVDFTVDTNGVYSEPRPIGTRYPTRNL |
| SEQ ID | MAADGYLPDWLEDTLSEGIRQWWKLKPGPPPPKPAERHKDDSRGLVLPGYRYLGPFNGLDKGE |
| NO: 78 | PVNEADAAALEHDKAYDRQLDSGDNPYLKYNHVDAEFQERLKEDTSFGGNLGRAVFQAKKRILE |
| (AAV | PLGLVEEPVKAAPGEKRPVEHSPAEPDSSSGTGKAGQQPARKRLNFGQTGDADSVPDPQPLGQ |
| hu.20 | PPAAPSGLGTNTMASGSGAPMADNNEGADGVGNSSGNWHCDSTWMGDRVITTSTRTWALP |
| (AAS9927 | TYNNHLYKQISSQSGASNDNHYFGYSTPWGHFDFNRFHCHFSPRDWQRLINNNWGFRPKRLSF |
| 1)) | KLFNIQVKEVTQNDGTTTIANNLTSTVQVFTDSEYQLPYVLGSAHQGCLPPFPADVFMVPQYGYL |
| | TLNNGSQAVGRSSFYCLEYFPSQMLRTGNNFTFSYTFEDVPFHSSYAHSQSLDRLMNPLIDQYLY |
| | YLSRTNTPSGTTTMSRLQFSQAGASDIRDQSRNWLPGPCYRQQRVSKTAADNNNSDYSWTGAT |
| | KYHLNGRDSLVNPGPAMASHKDDEEKYFPQSGVLIFGKQDSGKTNVDIEKVMITDEEEIRTTNPV |
| | ATEQYGSVSTNLQSGNTQAATSDVNTQGVLPGMVWQDRDVYLQGPIWAKIPHTDGHFHPSPP |
| | MGGFGLKHPPPQILIKNTPVPANPSTTFSAAKFASFITQYSTGQVSVEIEWELQKENSKRWNPEIQ |
| | YTSNYNKSVNVDFTVDTNGVYSEPRPIGARYLTRNL |
| SEQ ID | MAADGYLPDWLEDTLSEGIRQWWKLKPGPPPPKPAERHKDDSRGLVLPGYKYLGPFNGLDKGE |
| NO: 79 | PVNEADAAALEHDKAYDRQLDSGDNPYLKYNHADAEFQERLKEDTSFGGNLGRAVFQAKKRILE |
| (AAV | PLGLVEEPVKTAPGKKRPVEHSPAEPDSSSGTGKAGQQPARKRLNFGQTGDADSVPDPRPLGQP |
| hu.21 | PAAPSGLGTNTMASGSGAPMADNNEGADGVGNSSGNWHCDSTWMGDRVITTSTRTWALPT |
| (AAS9927 | YNNHLYKQISSQSGASNDNHYFGYSTPWGYFDFNRFHCHFSPRDWQRLINNNWGFRPKRLSFK |
| 2)) | LFNIQVKEVTQNDGTTTIANNLTSTVQVFTDSEYQLPYVLGSAHQGCLPPFPADVFMVPQYGYLT |
| | LNNGSQAVGRSSFYCLEYFPSQMLRTGNNFTFSYTFEDVPFHSSYAHSQSLDRLMNPLIDQYLYYL |
| | SRTNTPSGTTTMSRLQFSQAGASDIRDQSRNWLPGPCYRQQRVSKTAADNNNSDYSWTGATK |
| | YHLNGRDSLVNPGPAMASHKDDEEKYFPQSGVLIFGKQDSGKTNVDIEKVMITDEEEIRTTNPVA |
| | TEQYGSVSTNLQSGNTQAATSDVNTQGVLPGMVWQDRDVYLQGPIWAKIPHTDGHFHPSPL |
| | MGGFGLKHPPPQILIKNTPVPANPSTTFSAAKFASFITQYSTGQVSVEIEWELQKENSKRWNPEIQ |
| | YTSNYNKSVNVDFTVDTNGVYSEPRPIGTRYLTRNL |
| SEQ ID | MAADGYLPDWLEDTLSEGIRQWWKLKPGPPPPKPAERHKDDSRGLVLPGYKYLGPFNGLDKGE |
| NO: 80 | PVNEADAAALEHDKAYDRQLDSGDNPYLKYNHADAEFQERLKGDTSFGGNLGRAVFQAKKRILE |
| (AAV | PLGLVEEPVKTAPGKKRPVEHSPAEPDSSSGTGKAGQQPARKRLNFGQTGDADSVPDPQPLGQ |
| hu.22 | PPAAPSGLGTNTMASGSGAPMADNNEGADGVGNSSGNWHCDSTWMGGRVITTSTRTWALP |
| (AAS9927 | TYNNHLYKQISSQSGASNDNHYFGYSTPWGYFDFNRFHCHFSPRDWQRLINNNWGFRPKRLSF |
| 3)) | KLFNIQVKEVTQNDGTTTIANNLTSTVQVFTDSEYQLPYVLGSAHQGCLPPFPADVFMVPQYGYL |
| | TLNNGSQAVGRSSFYCLEYFPSQTLRTGNNFTFSYTFEDVPFHSSYAHSQSLDRLMNPLIDQYLYY |
| | LSRTNTPSGTTTMSRLQFSQAGASDIRDQSRNWLPGPCYRQQRVSKTAADNNNSDYSWTGAT |
| | KYHLNGRDSLVNPGPAMASHKDDEEKYFPQSGVLIFGKQDSGKTNVDIEKVMITDEEEIRTTNPV |
| | ATEQYGSVSTNLQSGNTQAATSDVNTQGVLPGMVWQDRDVYLQGPIWAKIPHTDGHFHPSPL |
| | MGGFGLKHPPPQILIKNTPVPANPSTTFSAAKFASFITQYSTGQVSVEIEWELQKENSKRWNPEIQ |
| | YTSNYNKSVNVDFTVDTNGVYSEPRPIGTRYLTRNL |
| SEQ ID | MAADGYLPDWLEDTLSEGIRQWWKLKPGPPPPKPAERHKDDSRGLVLPGYKYLGPFNGLDKGE |
| NO: 81 | PVNEADAAALEHDKAYDRQLDSGDNPYLKYNHADAEFQERLKEDTSFGGNLGRAVFQAKKRILE |
| (AAV | PLGLVEEPVKTAPGKKRPVEHSPAEPDSSSGTGKAGQQPARKRLNFGQTGDADSVPDPQPLGQ |
| hu.23 | PPAAPSGLGTNTMASGSGAPMADNNEGADGVGNSSGNWHCDSTWMGDRVITTSTRTWALP |
| (AAS9927 | TCNNHLYKQISSQSGASNDNHYFGYSTPWGYFDFNRFHCHFSPRDWQRLINNNWGFRPKRLSF |
| 4)) | KLFNIQVKEVTQNDGTTTIANNLTSTVQVFTDSEYQLPYVLGSAHQGCLPPFPADVFMVPQYGYL |
| | TLNNGSQAVGRSSFYCLEYFPSQMLRTGNNFTFSYTFEDVPFHSSYAHSQSLDRLMNPLIDQYLY |
| | YLSRTNTPSGTTTMSRLQFSQAGASDIRDQSRNWLPGPCYRQQRVSKTAADNNNSDYSWTGAT |
| | KYHLNGRDSLVNPGPAMASHKDDEEKYFPQSGVLIFGKQDSGKTNVDIEKVMITDEEEIRTTNPV |
| | ATEQYGSVSTYLQSGNTQAATSDVNTQGVLPGMVWQDRDVYLRGPIWAKIPHTDGHFHPSPL |
| | MGGFGLKHPPPQILIKNTPVPANPSTTFSAAKFASFITQYSTGQVSVEIEWELQKENSKRWNPEIQ |
| | YTSNYNKSVNVDFTVDTNGVYSEPRPIGTRYLTRNL |
| SEQ ID | MAADGYLPDWLEDTLSEGIRQWWKLKPGPPPPKPAERHKDGSRGLVLPGYKYLGPFNGLDKGE |
| NO: 82 | PVNEADAAALEHDKAYDRQLNSGDNPYLKYNHADAEFQERLKEDTSFGGNLGRAVFQAKKRVL |
| (AAV | EPLGLVEEPVKTAPGKKRPVEHSPAEPDSSSGTGKAGQQPARKRLNFGQTGDADSVPDPQPLG |
| hu.25 | QPPAAPSGLGSTTMATGSGAPMADNNEGADGVGNSSGNWHCDSQWLGDRVITTSTRTWAL |
| (AAS9927 | PTYNNHLYKQISSQSGASNDNHYFGYSTPWGYFDFNRFHCHFSPRDWQRLINNNWGFRPKRLN |
| 6)) | FKLFNIQVKEVTQNDGTTTIANNLTSTVQVFTDSEYQLPYVLGSAHQGCLPPFPADVFMVPQYGY |
| | LTLNNGSQAVGRSPFYCLEYFPSQMLRTGNNFQFSYTFEDVPFHSSYAHSQSLDRLMNPLIDQYL |
| | YYLNKTQTNSGTLQQSRLLFSQAGPTNMSLQAKNWLPGPCYRQQRLSKQANDNNNSNFPWTA |
| | ATKYHLNGRDSLVNPGPAMASHKDDEEKFFPMHGTLIFGKQGTNANDADLENVMITDEEEIRTT |
| | NPVATEQYGTVSNNLQNSNTGPTTGTVNHQGALPGMVWQDRDVYLQGPIWAKIPHTDGHFH |
| | PSPLMGGFGLKHPPPQIMIKNTPVPANPPTNFSSAKFASFITQYSTGQVSVEIEWELQKENSKRW |
| | NPEIQYTSNYNKSVNVDFTVDNNGVYSEPRPIGTRYLTRNL |
| SEQ ID | MAADGYLPDWLEDTLSEGIRQWWKLKPGPPPPKPAERHKDDSRGLVLPGYKYLGPFNGLDKGE |
| NO: 83 | PVNEADAAALEHDKAYDRQLDSGDNPYLKYNHADAEFQERLKEDTSFGGNLGRAVFQAKKRILE |
| (AAV | PLGLVEEPVKTAPGKKRPVEHSPAEPDSSSGTGKAGQQPARKRLNFGQTGDADSVPDPQPLGQ |
| hu.27 | PPAAPSGLGTNTMASGSGAPMADNNEGADGVGNSSGNWHCDSTWMGDRVITTSTRTWALP |
| (AAS9927 | TYNNHLYKQISSQSGASNDNHYFGYSTPWGYFDFNRFHCHFSPRDWQRLINNNWGFRPKRLSF |
| 7)) | KLFNIQVKEVTQNDGTTTIANNLTSTVQVFTDSGYQLPYVLGSAHQGCLPPFPADVFMVPQYGY |
| | LTLNNGSQAVGRSSFYCLEYFPSQMLRTGNNFTFSYTFEDVPFHSSYAHGQSLDRLMNPLIDQYL |
| | YYLSRTNTPSGTTTMSRLQFSQAGASDVRDQSRNWLPGPCYRQQRVSKTAADNNNSDYSWTG |
| | ATKYHLNGRDSLVNPGPAMASHKDDEEKYFPQSGVLVFGKQDSGKTNVDIEKVMITDEEEIRTT |
| | NPAATEQYGSVSTNLQSGNTQAATSDVNTQGVLPGMVWQDRDVYLQGPIWAKIPHTDGHFH |
| | PSPLMGGFGLKHPPPQILIKNTPVPANPSTTFSAAKFVSFITQYSTGQVSVEIEWELQKENSKRWN |
| | PEIQYTSNYNKSVNVDFTVDTNGVYSEPRPIGTRYLTRNL |
| SEQ ID | MAADGYLPDWLEDTLSEGIRQWWKLKPGPPPPKPAERHKDDSRGLVLPGYKYLGPFNGLDKGE |
| NO: 84 | PVNEADAAALEHDKAYDRQLDSGDNPYLKYNHADAEFQERLKEDTSFGGNLGRAVFQAKKRVL |
| (AAV | EPLSLVEEPVKTAPGKKRPVEHSPAEPDSSSGTGKSGNQPARKRLNFGQTGDSDSVPDPQPLGQ |
| hu.28 | PPAAPSGLGTNTMATGSGAPMADNNEGADGVGNSSGNWHCDSTWMGDRVITTSTRTWALP |
| (AAS9927 | TYNNHLYKQISSQSGASNDNHYFGYSTPWGYFDFNRFHCHFSPRDWQRLINNNWGFRPKRLNF |
| 8)) | KLFNIQVKEVTQNDGTTTIANNLTSTVQVFTDSEYQLPYVLGSAHQGCLPPFPADVFMVPQYGYL |
| | TLNNGSQAVGRSSFYCLEYFPSQMLRTGNNFTFSYTFEDVPFHSSYAHSQSLDRLMNPLIDQYLY |
| | YLSRTNTPSGTTTQSRLQFSQAGASDIQDQSRNWLPGPCYRQQRVSKTSADNNNSEYSWTGAT |
| | KYHLNGRDSLVNPGPAMASHKDDEEKFFPQSGVLIFGKQGSEKTNVDIEKVMITDEEEIRTTNPV |
| | ATEQYGSVSTNLQSGNTQAATADVNTQGVLPGMVGQDRDVYLQGPTWAKIPHTDGHFHPSPL |
| | MGGFGLKHPPPQILIKNTPVPANPSTTFSAAKFASFITQYSTGQVSVEIEWELQKENSKRWNPEIQ |
| | YTSNYNKSVNVDFTVDTNGVYSEPRPIGTRYLTRNL |
| SEQ ID | MAADGYLPDWLEDTLSEGIRQWWKLKPGPPPPKPAERHKDDSRGLVLPGYKYLGPFNGLDKGE |
| NO: 85 | PVNEADAAALEHDKAYDRQLDSGDNPYLKYNHADAEFQERLKEDTSFGGNLGRAVFQAKKRVL |
| (AAV | EPLGLVEEPVKTAPGKKRPVEHSPAEPDSSSGTGKSGNQPARKRLNFGQTGDSDSVPDPQPLGQ |
| hu.29 | PPAAPSGLGTNTMATGSGAPMADNNEGADGVGNSSGNWHCDSTWMGDRVITTSTRTWALP |
| (AAS9927 | TYNNHLYKQISSQSGASNDNHYFGYSTPWGYFDFNRFHCHFSPRDWQRLINNNWGFRPKRLNF |
| 9)) | KLFNIQVKEVTQNDGTTTIANNLTSTVQVFTDSEYQLPYVLGSAHQGCLPPFPADVFMVPQYGYL |
| | TLNNGSQAVGRSSFYCLGYFPSQMLRTGNNFTFSYTFEDVPFHSSYAHSQSLDRLMNPLIDQYLY |
| | YLSRTNTPSGTTTQSRLQFSQAGASDIRDQSRNWLPGPCYRQQRVSKTSADNNNSEYSWTGAT |
| | KYHLNGRDSLVNPGPAMASHKDDEEKFFPQSGVLIFGKQGPEKTNVDIEKVMITDEEEIRTTNPV |
| | ATEQYGSVSTNLQSGNTQAATADVNTQGVLPGMVWQDRDVYLQGPIWAKIPHTDGHFHPSPL |
| | MGGFGLKHPPPQILIKNTPVPANPSTTFSAAKFASFITQYSTGQVSVEIEWELQKENSKRWNPEIQ |
| | YTSNYNKSVNVDFTVDTNGVYSEPRPIGTRYLTRNL |
| SEQ ID | MAADGYLPDWLEDTLSEGIRQWWKLKPGPPPPKPAERHKDDSRGLVLPGYKYLGPGNGLDKGE |
| NO: 86 | PVNAADAAALEHDKAYDQQLKAGDNPYLKYNHADAEFQERLKEDTSFGGNLGRAVFQAKKRLL |
| (AAV | EPLGLVEEAAKTAPGKKRPVEQSPQEPDSSAGIGKSGSQPAKKKLNFGQTGDTESVPDPQPIGEP |
| hu.31 | PAAPSGVGSLTMASGGGAPVADNNEGADGVGSSSGNWHCDSQWLGDRVITTSTRTWALPTY |
| (AAS9928 | NNHLYKQISNSTSGGSSNDNAYFGYSTPWGYFDFNRFHCHFSPRDWQRLINNNWGFRPKRLNF |
| 1)) | KLFNIQVKEVTDNNGVKTIANNLTSTVQVFTDSDYQLPYVLGSAHEGCLPPFPADVFMIPQYGYL |
| | TLNDGGQAVGRSSFYCLEYFPSQMLRTGNNFQFSYEFENVPFHSSYAHSQSLDRLMNPLIDQYLY |
| | YLSKTINGSGQNQQTLKFSVAGPSNMAVQGRNYIPGPSYRQQRVSTTVTQNNNSEFAWPGASS |
| | WALNGRNSLMNPGPAMASHKEGEDRFFPLSGSLIFGKQGTGRDNVDADKVMITNEEEIKTTNP |
| | VATESYGQVATNHQSAQAQAQTGWVQNQGILPGMVWQDRDVYLQGPIWAKIPHTDGNFHP |
| | SPLMGGFGMKHPPPQILIKNTPVPADPPTAFNKDKLNSFITQYSTGQVSVEIEWELQKENSKRW |
| | NPEIQYTSNYYKSNNVEFAVSTEGVYSEPRPIGTRYLTRNL |
| SEQ ID | MAADGYLPDWLEDTLSEGIRQWWKLKPGPPPPKPAERHKDDSRGLVLPGYKYLGPGNGLDKGE |
| NO: 87 | PVNAADAAALEHDKAYDQQLKAGDNPYLKYNHADAEFQERLKEDTSFGGNLGRAVFQAKKRLL |
| (AAV | EPLGLVEEAAKTAPGKKRPVEQSPQEPDSSAGIGKSGSQPAKKKLNFGQTGDTESVPDPQPIGEP |
| hu.32 | PAAPSGVGSLTMASGGGAPVADNNEGADGVGSSSGNWHCDSQWLGDRVITTSTRTWALPTY |
| (AAS9928 | NNHLYKQISNSTSGGSSNDNAYFGYSTPWGYFDFNRFHCHFSPRDWQRLINNNWGFRPKRLNF |
| 2)) | KLFNIQVKEVTDNNGVKTIANNLTSTVQVFTDSDYQLPYVLGSAHEGCLPPFPADVFMIPQYGYL |
| | TLNDGSQAVGRSSFYCLEYFPSQMLRTGNNFQFSYEFENVPFHSSYAHSQSLDRLMNPLIDQYLY |
| | YLSKTINGSGQNQQTLKFSVAGPSNMAVQGRNYIPGPSYRQQRVSTTVTQNNNSEFAWPGASS |
| | WALNGRNSLMNPGPAMASHKEGEDRFFPLSGSLIFGKQGTGRDNVDADKVMITNEEEIKTTNP |
| | VATESYGQVATNHQSAQAQAQTGWVQNQGILPGMVWQDRDVYLQGPIWAKIPHTDGNFHP |
| | SPLMGGFGMKHPPPQILIKNTPVPADPPTAFNKDKLNSFITQYSTGQVSVEIEWELQKENSKRW |
| | NPEIQYTSNYYKSNNVEFAVNTEGVYSEPRPIGTRYLTRNL |
| SEQ ID | MAADGYLPDWLEDTLSEGIRQRWKLKPGPPPPEPAERHKDDSRGLVLPGYKYLGPFNGLDKGEP |
| NO: 88 | VNEADAAALEHDKAYDRQLDSGDNPYLKYNHADAEFQERLKEDTSFGGNLGRAVFQAKKRVLE |
| (AAV | PLGLVEEPVKTAPGKKRPVEHSPVEPDSSSGTGKAGQQPARKRLNFGQTGDADSVPDPQPLGQ |
| hu.34 | PPAAPSGLGTNTMATGSGAPMADNNEGADGVGNSSGNWHCDSTWMGDRVITTSTRTWALP |
| (AAS9928 | TYNNHLYKQISSQSGASNDNHYFGYSTPWGYFDFNRFHCHFSPRDWQRLINNNWGFRPKRLNF |
| 3)) | KLFNIQVKEVTQNDGTTTIANNLTSTVQVFTDSEYQLPYVLGSAHQGCLPPFPADVFMVPQYGYL |
| | TLNNESQAVGRSSFYCLEYFPSQMLRTGNNFTFSYTFEDVPFHSSYAHSQSLGRLMNPLIDQYLYY |
| | LSRTNTPSGTTTQSRLQFSQAGASDIRDQSRNWLPGPCYRQQRVSKTSADNNNSEYSWTGATK |
| | YHLNGRDSLVNPGPAMASHKDDEEKFFPQSGVLIFGKQGSEKTNVDIEKVMITDEEEIRTTNPVA |
| | TEQYGSVSTNLQRGNRQAATADVNTQGVLPGMVWQDRDVYLQGPIWAKIPHTDGHFHPSPL |
| | MGGFGLKHPPPQILIKNTPVPANPSTTFSAAKFASFITQYSTGQVSVEIEWELQKENSKRWNPEIQ |
| | YTSNYNKSVNVDFTVDTNGVYSEPRPIGTRYLTRNL |
| SEQ ID | MAADGYLPDWLEDNLSEGIREWWDLKPGAPKPKANQQKQDDGRGLVLPGYKYLGPFNGLDK |
| NO: 89 | GEPVNAADAAALEHDKAYDQQLKAGDNPYLRYNHADAEFQERLQEDTSFGGNLGRAVFQAKK |
| (AAVhu.3 | RVLEPLGLVEEAAKTAPGKKRPVEPSPQRSPDSSTGIGKKGQQPAKKRLNFGQTGDSESVPDPQP |
| 7 | IGEPPAGPSGLGSGTMAAGGGAPMADNNEGADGVGSSSGNWHCDSTWLGDRVITTSTRTWA |
| (AAS9928 | LPTYNNHLYKQISNGTSGGSTNDNTYFGYSTPWGYFDFNRFHCHFSPRDWQRLINNNWGFRPK |
| 5)) | RLSFKLFNIQVKEVTQNEGTKTIANNLTSTIQVFTDSEYQLPYVLGSAHQGCLPPFPADVFMIPQY |
| | GYLTLNNGSQAVGRSSFYCLEYFPSQMLRTGNNFEFSYTFEDVPFHSSYAHSQSLDRLMNPLIDQ |
| | YLYYLSRTQSTGGTQGTQQLLFSQAGPANMSAQAKNWLPGPCYRQQRVSTTLSQNNNSNFAW |
| | TGATKYHLNGRDSLVNPGVAMATHKDDEERFFPSSGVLMFGKQGAGRDNVDYSSVMLTSEEEI |
| | KTTNPVATEQYGVVADNLQQTNTGPIVGNVNSQGALPGMVWQNRDVYLQGPIWAKIPHTDG |
| | NFHPSPLMGGFGLKHPPPQILIKNTPVPADPPTTFSQAKLASFITQYSTGQVSVEIEWELQKENSK |
| | RWNPEIQYTSNYYKSTNVDFAVNTEGTYSEPRPIGTRYLTRNL |
| SEQ ID | MAADGYLPDWLEDNLSEGIREWWDLKPGAPKPKANQQKQDDGRGLVLPGYKYLGPFNGLDK |
| NO: 90 | GEPVNAADAAALEHDKAYDQQLKAGDNPYLRYNHADAEFQERLQEDTSFGGNLGRAVFQAKK |
| (AAV | RVLEPLGLVEEGAKTAPGKKRPVEPSPQRSPDSSTGIGKKGQQPARKRLNFGRTGDSESVPDPQP |
| hu.39 | IGEPPAAPSSVGSGTMAAGGGAPMADNNEGADGVGSSSGNWHCDSTWLGDRVITTSTRTWA |
| (AAS9928 | LPTYNNHLYKQISNGTSGGSTNDNTYFGYSTPWGYLDFNRFHCHFSPRDWQRLINNNWGFRPK |
| 6)) | RLSFKLFNIQVKEVTQNEGTKTIANNLASTIQVFTDSEYQPPYVLGSAHQGCLPPFPADVFMIPQY |
| | GYLTLNNGSQAVGRSSFYCLEYFPSQMLRTGNNFSFSYTFEDVPFHSSYAHSQSLDRLMNPLIDQ |
| | YLYYLSRTQSTGGTAGTQQLLFSRAGPSNMSAQARNWLPGPCYRQQRVSTTLSQNNNSNFAW |
| | TGATKYHLNGRDSLVNPGVAMATNKDDEDRFFPSSGILMFGKQGAGKDNVDYSNVMLTSEEEI |
| | KTTNPVATEQYGVVADNLQQQNTAPTVGAVNSQGALPGMVWQNRDVYLQGPIWAKIPHTD |
| | GNFHPSPLMGGFGLKHPPPQILIKNTPVPADPPTAFNQAKLNSFIAQYSTGQVSVEIEWELQKEN |
| | SKRWNPEIQYTSNYYKSTNADFAVNTEGVYSEPRPIGTRYLTRNL |
| SEQ ID | MAADGYLPDWLEDNLSEGIREWWDLKPGAPKPKANQQKQDDGRGLVLPGYKYLGPFNGLDK |
| NO: 91 | GEPVNAADAAALEHDKAYDQQLKAGDNPYLRYNHADAEFQERLQEDTSFGGNLGRAVFQAKK |
| (AAV | RVLEPLGPVEEAAKTAPGKKRPVEPPPQRSPDSSTGIGKKGQQPAKKRLNFGQTGDSESVPDPQ |
| hu.41 | PIGEPPAGPSGLGSGTMAAGGGAPMADNNEGADGVGSSSGNWHCDSTWLGDRVITTSTRTW |
| (AAS9928 | ALPTYNNHLYKQISNGTSGGSTNDNTYFGYSTPWGYFDFNRFHCHFSPRDWQRLINNNWGFRP |
| 9)) | KRLSFKLFNIQVKEVTQNEGTKTVANNLTSTIQVFTDSEYQLPYVLGSAHQGCLPPFPADVFMIPQ |
| | YGYLTLNNGSQAVGRSSFYCLEYFPSQMLRTGNNFEFSYTFEDVPFHSSYAHSQSLDRLMNPLID |
| | QYLYYLSRTQSTGGTQGTQQLLFSQAGPANMSAQAKNWLPGPCYRQQRVSTTLSQNNNSNFA |
| | WTGATKYHLNGRDSLVNPGVAMATHKDDEERFFPSSGVLMFGKQGAGRDNVDYSSVMLTSEE |
| | EIKTTNPVATEQYGVVADNLQQTNTGPIVGNVNSQGALPGMVWQNRDVYLQGPIWAKIPHTD |
| | GNFHPSPLMGGFGLKHPPPQILIKNTPVPADPPTTFSQAKLASFITQYSTGQVSVEIEWELQKENS |
| | KRWNPEIQYTSNYYKSTNVDFAVNTEGTYSEPRPIGTRYLTRNL |
| SEQ ID | MAADGYLPDWLEDNLSEGIREWWDLKPGAPKPKANQQKQDDGRGLVLPGYKYLGPFNGLDK |
| NO: 92 | GEPVNAADAAALEHDKAYDQQLKAGDNPYLRYNHADAEFQERLQEDTSFGGNLGRAVFQAKK |
| (AAV | RVLEPLGLVEEAAKTAPGKKRPVEPSPQRSPDSSTGIGKKGQQPAKKRLNFGQTGDSESVPDPQP |
| hu.42 | IGEPPAGPSGLGSGTMAAGGGAPMADNNEGADGVGSSSGNWHCDSTWLGDRVITTSTRTWA |
| (AAS9929 | LPTYNNHLYKQISNGTSGGSTNDNTYFGYSTPWGYFDFNRFHCHFSPRDWQRLINNNWGFRPK |
| 0)) | RLSFKLFNIQVKEVTQNEGTKTIANNLTSTIQVFTDSEYQLPYVLGSAHQGCLPPFPADVFMIPQY |
| | GYLTLNNGSQAVGRSSFYCLEYFPSQMLRTGNNFEFSYTFEDVPFHSSYAHSQSLDRLMNPLIDQ |
| | YLYYLSRTQSTGGTQGTQQLLFSQAGPANMSAQAKNWLPGPCYRQQRVSTTLSQSNNSNFAW |
| | TGATKYHLNGRDSLVNPGVAMATHKDDEERFFPSSGVLMFGKQGAGRDNVDYSSVMLTSEEEI |
| | KTTNPVATEQYGVVADNLQQTNTGPIVGNVNSQGALPGMVWQNRDVYLQGPIWAKIPHTDG |
| | NFHPSPLMGGLGLKHPPPQILIKNTPVPADPPTTFSQAKLASFITQYSTGQVSVEIEWELQKENSK |
| | RWNPEIQYTSNYYKSTNVDFAVNTEGTYSEPRPIGTRYLTRNL |
| SEQ ID | MAADGYLPDWLEDNLSEGIREWWDLKPGAPKPKANQQKQDDGRGLVLPGYKYLGPFNGLDK |
| NO: 93 | GEPVNAADAAALEHDKAYDQQLKAGDNPYPRYNHADAEFQERLQEDTPFGGNLGRAVFQAKK |
| (AAV | RVLEPLGLVEEAAKTAPGKKRPVEPSPQRSPDSSTGIGKKGQQPAKKRLNFGQTGDSESVPDPQP |
| hu.43 | IGEPPAGPSGLGSGTMAAGGGAPMADNNEGADGVGNASGNWHCDSTWLGDRVITTSTRTW |
| (AAS9929 | ALPTYNNHLYKQISSASTGASNDNHYFGYSTPWGYFDFNRFHCHFSPRDWQRLINNNWGFRPK |
| 1)) | RLNFKLFNIQVKEVTTNDGVTTIANNLTSTVQVFSDSEYQLPYVLGSAHQGCLPPFPADVFMIPQY |
| | GYLTLNNGSQAVGRSSFYCLEYFPSQMLRTGNNFTFSYTFEEVPLHSSYAHSQSLDRLMNPLIVQY |
| | LYYLNRTQNQSGSAQNKDLLFSRGSPAGMSVQPKNWLPGPCYRQQRVSKTKTDNNNSNFTWT |
| | GASKYNLNGRESIINPGTAMASHKDDEDKFFPMSGVMIFGKESAGASNTALDNVMITDEEEIKA |
| | TNPVATERFGTVAVNFQSSSTDPATGDVHAMGALPGMVWQDRDVYLQGPIWAKIPHTDGHF |
| | HPSPLMGGFGLKNPPPQILIKNTPVPANPPAEFSATKFASFITQYSTGQVSVEIEWELQKENSKR |
| | WNPEVQYTSNYAKSASVDFTVDNNGLYTEPRPIGTRYLTRPL |
| SEQ ID | MAADGYLPDWLEDTLSEGIRQWWKLRPGPPPPKPAERHKDDSRGLVLPGYKYLGPFNGLDKGE |
| NO: 94 | PVNEADAAALEHDKAYDRQLDSGDNPYLKYNHADAEFQERLKEDTSFGGNLGRAVFQAKKRVL |
| (AAV | EPLGLVEEGAETAPGKKRPVEQSPQGPDSSSGIGKTGQQPAKKRLNFGQTGDSESVPDPQPLGE |
| hu.44 | PPATPAAVGPTTMASGGGAPMADNNEGADGVGNASGNWHCDSTWLGDRVITTSTRTWALP |
| (AAS9929 | TYNNHLYKQISSASTGASNDNHYFGYSTPWGYFDFNRFHCHFSPRDWQRLINNNWGFRPKRLN |
| 2)) | FKLFNIQVKEVTTNDGVTTIANNLTSTVQVFSDSEYQLPYVLGSAHQGCLPPFPADVFMIPQYGYL |
| | TLNNGSQAVGRSSFYCLEYFPSQMLRTGNNFTFSYTFEEVPFHSSYAHSQSLDRLMNPLIDQYLYY |
| | PNRTQNQSGSAQNKDLLFSRGSPAGMSVQPKNWLPGPCYRQQRVSKTKTDNNNSNFTWTGA |
| | SKYNLNGRESIINPGTAMASHKDDEDKFFPMSGVMIFGKESAGASNTALDNVMITDEEEIKATN |
| | PVATERFGTVAVNFQSSSTDPATGDVHAMGALPGMVWQGRDVYLQGPIWAKIPHTDGHFHP |
| | SPLMGGFGLKNPPPQILIKNTPVPANPPAEFSATKFASFITQYSTGQVSVEIEWELQKENSKRWN |
| | PEVQYTSNYAKSANVDFTVDNNGLYTEPRPIGTRYLTRPL |
| SEQ ID | MAADGYLPDWLEDTLSEGIRQWWKLKPGPPPPKPAERHRDDSRGLVLPGYKYLGPFNGLDKGE |
| NO: 95 | PVNEADAAALEHDKAYDRQLDSGDNPYLKYNHADAEFQERLKEDTSFGGNLGRAVFQAKKRVL |
| (AAV | EPLGLVEEPVKTAPGKKRPVEHSPVEPDSSSGTGKAGQQPARKRLNFGQTGDADSVPDPQPLG |
| hu.45 | QPPAAPSGLGTNTMATGSGAPMADNNEGADGVGNSSGNWHCDSTWMGDRVITTSTRTWAL |
| (AAS9929 | PTYNNHLYKQISSQSGASNDNHYFGYSTPWGYFDFNRFHCHFSPRDWQRLINNNWGFRPKRLN |
| 3)) | FKLFNIQVKEVTQNDGTTTIANNLTSTVQVFTDSGYQLPYVLGSAHQGCLPPFPADVFMVPQYG |
| | YPTLNNGSQAVGRSSFYCLEYFPSQMLRTGNNFTFSYTFEDVPFHSSYAHSQSLDRLMNPLIDQY |
| | LYYLSTTNTPSGTTTQSRLQFSQAGASDIRDQSRNWLPGPCYRQQRVSKTSADNNNSEYSWTGA |
| | TKYHLNGRDSLVNPGPAVASHKDDEEKFFPQSGVLIFGKQGSEKTNVDIEKVMITDEEEIRTTNPV |
| | ATEQYGSVSTNLQRGNRQAATADVNTQGVLPGMVWQDRDVYLQGPIWAKIPHTDGHFHPSP |
| | LMGGFGLKHPPPQILIKNTPVPANPSTTFSAAKFASFITQYSTGQVSVEIEWELQKENSKRWNPEI |
| | QYTSNYNKSVNVDFTVDTNGVYSEPRPIGTRYLTRNL |
| SEQ ID | MAADGYLPDWLEDTLSEGIRQWWKLKPGPPPPKPAERHKDDSRGLVLPGYKYLGPFNGLDKGE |
| NO: 96 | PVNEADAAALEHDKAYDRQLDSGDNPYLKYNHADAEFQERLKEDTSFGGNLGRAVFQAKKRVL |
| (AAV | EPLGLVEEGAKTAPGKKRPVEQSPQEPDSPSGIGKTGQQPAKKRLNFGQTGDSESVPDPQPLGE |
| hu.46 | PPATPAAVGPTTMASGGGAPMADNNEGADGVGNASGNWHCDSTWLGDRVITTSTRTWALP |
| (AAS9929 | TYNNHLYKQISSASTGASNDNHYFGYSTPWGYFDFNRFHCHFSPRDWQRLINNNWGFRPKRLN |
| 4)) | FKLFNIQVKEVTTNDGVTTIANNLTSTVQVFSDSEYQLPYVLGSAHQGRLPPFPADVFMIPQYGYL |
| | TLNNGSQAVGRSSSYCLEYFPSQMLRTGNNFTFSYTFEEVPLHSSCAHSQSLDRLMNPLIDQYLYY |
| | LNRTQNQSGSAQNRDLLFSRGSPAGMSVQPKNWLPGPCYRQQRVSKTKTDNNNSNFTWTGA |
| | SKYNLNGRESIINPGTAMASHKDDEDKFFPMSGVMIFGKESAGASNTALDNVMITDEEEIKATN |
| | PVATERFGTVAVNFQSSSTDPATGDVHAMGALPGMVWQDRDVYLQGPIWAKIPHTDGHFHP |
| | SPLMGGFGLKNPPPQILIKNTPVPANPPAEFSATKFASFITQYSAGQVSVEIEWELQKENSKRWN |
| | PEVQYTSNYAKSANVDFTVDNNGLYTEPRPIGTRYLTRPL |
| SEQ ID | MAADGYLPDWLEDTLSEGIRQWWKLKPGPPPPKPAERHRDDSRGLVLPGYKYLGPFNGLDKGE |
| NO: 97 | PVNEADAAALEHDKAYDRQLDSGDNPYLKYNHADAEFQERLKEDTSFGGNLGRAVFQAKKRVL |
| (AAV | EPLGLVGEPVKTAPGKKRPVEHSPVEPDSSSGTGKAGQQPARKRLNFGQTGDADSVPDPQPLG |
| hu.47 | QPPAAPSGLGTNTMATGSGAPMADNNEGADGVGNSSGNWHCDSTWMGDRVITTSTRTWAL |
| (AAS9929 | PTYNNHLYKQISSQSGASNDSHYFGYSTPWGYFDFNRFHCHFSPRDWQRLINNNWGFRPKRLN |
| 5)) | FKLFNIQVKEVTQNDGTTTIANNLTSTVQVFTDSEYQLPYVLGSAHQGCLPPFPADVFMVPQYGY |
| | LTLNNGSQAVGRSSFYCLEYFPSQMLRTGNNFTFSYTFEDVPFHSSYAHSQSLDRLMNPLIDQYLY |
| | YLSTTNTPSGTTTQSRLQFSQAGASDIRDQSRNWLPGPCYRQQRVSKTSADNNNSEYSWTGAT |
| | KYHLNGRDSLVNPGPAMASHKDNEEKFFPQSGVLIFGKQGSEKTNVDIEKVMITDEEEIRTTNPV |
| | ATEQYGSVSTNLQRGNRQAATADVNTQGVLPGMVWQDRDVYLQGPIWAKIPHTDGHFHPSP |
| | LMGGFGLKHPPPQILIKNTPVPANPSTTFSAAKFASFITQYSTGQVSVEIEWELQKENSKRWNPEI |
| | QYTSNYNKSVNVDFTVDTNGVYSEPRPIGTRYLTRNL |
| SEQ ID | MAADGYLPDWLEDNLSEGIREWWDLKPGAPKPKANQQKQDDGRGLVLPGYKYLGPFNGLDK |
| NO: 98 | GEPVNAADAAALEHDKAYDQQLKAGDNPYLRYNHADAEFQERLQEDTSFGGNLGRAVFQAKK |
| (AAV | RVLEPLGLVEEGAKTAPGKKRPVEQSPQEPDSSSGIGKTGQQPAKKRLNFGQTGDSESVPDPQPL |
| hu.48 | GEPPATPAAVGPTTMASGGGAPMADNNEGADGVGNASGNWHCDSTWLGDRVITTSTRTWA |
| (AAS9929 | LPTYNNHLYKQISSTSTGASNDNHYFGYGTPWGYFDFNRFHCHFSPRDWQRLINNNWGFRPKR |
| 6)) | LNFKLFNIQVEEVTTNDGVTTIANNLTSTVQVFSDSEYQLPYVLGSAHQGCLPPFPADVFMIPQY |
| | GYLTLNNGSQAVGRSSFYCLEYFPSQMLRTGNNFTFSYTFEEVPFHSSYAHSQSLDRLMNPLIDQ |
| | YLYYLNRTQNQSGSAQNKDLLFSRGSPAGMSVQPKNWLPGPCYRQQRVSKTKTDNNNSNFTW |
| | TGASKYNLNGRESIINPGTAVASHKDDEDKFFPMSGVMIFGKESAGASSTALDNVMITDEEEIKA |
| | TNPVATERFGTVAVNFQSSSTDPATGDVHAMGALPGMVWQDRDVYLQGPIWAKIPHTDGHF |
| | HPSPLMGGFGLKNPPPQILIKNTPVPANPPAEFSATKFASFITQYSTGQVSVEIEWELQKENSKR |
| | WNPEVQYTSNYAKSANVDFTVDNNGLYTEPRPIGTRYLTRPL |
| SEQ ID | MAADGYLPDWLEDTLSEGIRQWWKLKPGPPPPKPAERHKDDSRGLVLPGYKYLGPFNGLDKGE |
| NO: 99 | PVNEADAAALEHDKAYDRQLDSGDNPYLKYNHADAEFQERLKEDTSFGGNLGRAVFQAKKRVL |
| (AAV | EPLGLVGEPVKTAPGKKRPVEHSPVEPDSSSGTGKAGQQPARKRLNFGQTGDADSVPDPQPLG |
| hu.51 | QPPAAPSGLGTNTMATGSGAPMADNNEGADGVGNSSGNWHCDSTWMGDRVITTSTRTWAL |
| (AAS9929 | PTYNNHLYKQISSQSGASNDNHYFGYSTPWGYFDFNRFHCHFSPRDWQRLINNNWGFRPKRLN |
| 8)) | FKLFNIQVKEVTQNDGTTTIANNLTSTVQVFTDSEYQLPYVLGSAHQGCLPPFPADVFMVPQYGY |
| | LTLNNGSQAVGRSSFYCLEYFPSQMLRTGNNFTFSYTFEDVPFHSGYAHSQSLDRLMNPLIDQYL |
| | YYLSTTNTPSGTTTQSRLQFSQAGASDIRDQSRNWLPGPCYRQQRVSKTSADNNNSEYSWTGAT |
| | KYHLNGRDSLVNPGPAMASHKDNEEKFFPQSGVLIFGKQGSEKTNVDIEKVMITDEEEIRTTNPV |
| | ATEQYGSVSTNLQRGNRQAATADVNTQGVLPGMVWQDRDVYLQGPIWAKIPHTDGHFHPSP |
| | LMGGFGLKHPPPQILIKNTPVPANPSTTFSAAKFASFITQYSTGQVSVEIEWELQKENSKRWNPEI |
| | QYTSNYNKSVNVDFTVDTNGVYSEPRPIGTRYLTRNL |
| SEQ ID | MAADGYLPDWLEDTLSEGIRQWWKLKPGPPPPKPAERHKDDSRGLVLPGYKYLGPFNGLDKGE |
| NO: 100 | PVNEADAAALEHDKAYDRQLDSGDNPYLKYNHADAEFQERLKEDTSFGGNLGRAVFQAKKRVL |
| (AAV | EPLGLVGEPVKTAPGKKRPVEHSPVEPDSSSGTGKAGQQPARKRLNFGQTGDADSVPDPQPLG |
| hu.52 | QPPAAPSGLGTNTMATGSGAPMADNNEGADGVGNSSGNRHCDSTWMGDRVITTSTRTWAL |
| (AAS9929 | PTYNNHLYRQISSQSGASNDNHYFGYSTPWGYFDFNRFHCHFSPRDWQRLINNNWGFRPKRLN |
| 9)) | FKLFNIQVKEVTQNDGTTTIANNLTSTVQVFTDSEYQLPYVLGSAHQGCLPPFPADVFMVPQYGY |
| | LTLSNGSQAVGRSSFYCPEYFPSQMLRTGNNFTFSYTFEDVPFHSSYAHSQSLDRLMNPLIDQYLY |
| | YLSTTNTPSGTTTQSRLQFSQAGASDIRDQSRNWLPGPCYRQQRVSKTSADNNNSEYSWTGAT |
| | KYHLNGRDSLVNPGPAMASHKDNEEKFFPQSGVLIFGKQGSEKTNVDIEKVMITDEEEIRTTNPV |
| | ATEQYGSVSTNLQRGNRQAATADVNTQGVLPGMVWQDRDVYLQGPIWAKIPHTDGHFHPSP |
| | LMGGFGPKHPPPQILIKNTPVPANPSTTFSAAKFASFITQYSTGQVSVEIEWELQKENSKRWNPEI |
| | QYTSNYNKSVNVDFTVDTNGVYSEPRPIGTRYLTRNL |
| SEQ ID | MAADGYLPDWLEDTLSEGIRQWWKLKPGPPPPKPAERHKDDSRGLVLPGYKYLGPFNGLDKGE |
| NO: 101 | PVNEADAAALEHDKAYDRQLDSGDNPYLKYNHADAEFQERLKEDTSFGGNLGRAVFQAKKRVL |
| (AAV | EPLGLVEEPVKTAPGKKRPVEHSPAEPDSSSGTGKAGQQPARKRLNFGQTGDADSVPDPQPLRQ |
| hu.53 | PPAAPTSLGSTTMATGSGAPMADNNEGADGVGNSSGNWHCDSQWLGDRVITTSTRTWALPT |
| (AAS9930 | YNNHLYKQISSQSGASNDNHYFGYSTPWGYFDFNRFHCHFSPRDWQRLINNNWGFRPKRLNFK |
| 0)) | LFNIQVKEVTQNDGTTTIANNLTSTVQVFTDSEYQLPYVLGSAHQGCLPPFPADVFMVPQYGYLT |
| | LNNGSQAVGRSSFYCLEYFPSQMLRTGNNFQFSYTFEDVPFHSSYAHSQSLDRLMNPLIDQYLYY |
| | LNRTQTASGTQQSRLLFSQAGPTSMSLQAKNWLPGPCYRQQRLSKQANDNNNSNFPWTGATK |
| | YYLNGRDSLVNPGPAMASHKDDEEKFFPMHGTLIFGKEGTNATNAELENVMITDEEEIRTTNPV |
| | ATEQYGYVSNNLQNSNTAASTETVNHQGALPGMVWQDRDVYLQGPIWAKIPHTDGHFHPSPL |
| | MGGFGLKHPPPQIMIKNTPVPANPPTNFSSAKFASFITQYSTGQVSVEIEWELQKENSKRWNPEI |
| | QYTSNYNKSVNVDFTVDTNGVYSEPRPIGTRYLTRNL |
| SEQ ID | MAADGYLPDWLEDTLSEGIRQWWKLKPGPPPPKPAERHKDDSRGLVLPGYKYLGPFNGLDKGE |
| NO: 102 | PVNEADAAALEHDKAYDRQLDSGDNPYLKYNHADAEFQERLKEDTSFGGNLGRAVFQAKKRVL |
| (AAV | EPLGLVEEPVKTAPGKKRPVEHSPAEPDSSSGTGKAGQQPARKRLNFGQTGDADSVPDPQPLG |
| hu.54 | QPPAAPTSLGSTTMATGSGAPMADNNEGADGVGNSSGNWHCDSQWLGDRVITTSTRTWALP |
| (AAS9930 | TYNNHLYKQISSQSGASNDNHYFGYSTPWGYFDFNRFHCRFSPRDWQRLINNNWGFRPKRLNF |
| 1)) | KLFNIQVKEVTQNDGTTTIANNLTSTVQVFTDSEYQLPYVLGSAHQGCLPPFPADVFMVPQYGYL |
| | TLNNGSQAVGRSSFYCLEYFPSQMLRTGNNFQFSYTFEDVPFHSSYAHSQGLDRLMNPLIDQYLY |
| | YLNRTQTASGTQQSRLLFSQAGPTSMSLQAKNWLPGPCYRQQRLSKQANDNNNSNFPWTGAT |
| | KYHLNGGDSLVNPGPAMASHKDDEEKFFPMHGTLIFGKEGTNATNAELENVMITDEEEIRTTNP |
| | VATEQYGYVSNNLQNSNTAASTETVNHQGALPGMVWQDRDVYLRGPIWAKIPHADGHFHPSP |
| | LMGGFGLKHPPPQIMIKNTPVPANPPTNFSSAKFASFITQYSTGQVSVEIEWELQKENSKRWNPE |
| | IQYTSNYNKSVNVDFTVDTNGVYSEPRPIGTRYLTRNL |
| SEQ ID | MAADGYLPDWLEDTLSEGIRQWWKLKPGPPPPKPAERHKDDSRGLVLPGYKYLGPFNGLDKGE |
| NO: 103 | PVNEADAAALEHDKAYDRQLDSGDNPYLKYNHADAEFQERLKEDTSFGGNLGRAVFQAKKRVL |
| (AAV | EPLGLVEEPVKTAPGKKRPVEHSPAEPDSSSGTGKAGQQPARKRLNFGQTGDADSVPDPQPLG |
| hu.55 | QPPAAPTSLGSTTMATGSGAPMADNNEGADGVGNSSGNWHCDSQWLGDRVITTSTRTWALP |
| (AAS9930 | TYNNHLYKQISSQSGASNDNHYFGYSTPWGYFDFNRFHCHFSPRDWQRLINNNWGFRPKRLNF |
| 2)) | KLFNIQVKEVTQNDGTTTIANNLTSTVQVFTDSEYQLPYVLGSAHQGCLPPFPADVFMVPQYGYL |
| | TLNNGSQAVGRSSFYCLECFPSQMLRTGNNFQFSYTFEDVPFHSSYAHSQSLDRLMNPLIDQYLY |
| | YLNRTQTASGTQQSRLLFSQAGPTSMSLQAKNWLPGPCYRQQRLSKQANDNNNSNFPWTGAT |
| | KYHLNGRDSLVNPGPAMASHKDDEEKFFPMHGTLIFGKEGTNATNAELENVMITDEEEIRTTNP |
| | VATEQYGYVSNNLQNSNTAASTETVNHQGALPGMVWQDRDVYLQGPIWAKIPHTDGHFHPS |
| | PLMGGFGLKHPPPQIMIKNTPVPANPPTNFSSAKFASFITQYSTGQVSVEIEWELQKENSKRWN |
| | PEIQYTSNYNKSVNVDFTVDTNGVYSEPRPIGTRYLTRNL |
| SEQ ID | MAADGYLPDWLEDTLSEGIRQWWKLKPGPPPPKPAERHKDDSRGLVLPGYKYLGPFNGLDKGE |
| NO: 104 | PVNEADAAALEHDKAYDRQLDSGDNPYLKYNHADAEFQERLKEDTSFGGNLGRAVFQAKKRVL |
| (AAV | EPLGLVEEPVKTAPGKKRPVEHSPVEPDSSSGTGKAGNQPARKRLNFGQTGDADSVPDPQPLGQ |
| hu.56 | PPASPSGLGTNTMATGSGAPMADNNEGADGVGNSSGNWHCDSTWMGDRVVTTSTRTWAL |
| (AAS9930 | PTYNNHLYKQISSQSGASNDNHYFGYSTPWGYFDFNRFHCHFSPRDWQRLINNNWGFRPKRLN |
| 3)) | FKLFNIQVKEVTQNDGTTTIANNLTSTVQVFTDLEYQLPYVLGSAHQGCLPPFPADVFMVPQYGY |
| | LTLNNGSQAVGRSSFYCLEYFPSQMLRTGNNFTFSYTFEDVPFHSSYAHSQSLDRLMNPLIDQYLY |
| | YLSRTNTPSGTTTQSRLQFSQAGASDIRDQSRNWLPGPCYRQQRVSKTAADNNNSEYSWTGAT |
| | KYHLNGRDSLVNPGPAMASHKDDEEKFFPQSGVLIFGKQGSEKTNVDIEKVMITDEEEIRTTNPV |
| | ATEQYGSVSTNLQSGNTQAATSDVNTQGVLPGMVWQDRDVYLQGPIWAKIPHTDGHFHPSPL |
| | MGGFGLKHPPPQILIKNTPVPANPSTTFSAAKFASFITQYSTGQVSVEIEWELQKENSKRWNPEIQ |
| | YTSNYNKSVNVDFTVDTNGVYSEPRPIGTRYLTRNL |
| SEQ ID | MAADGYLPDWLEDTLSEGIRQWWKLKPGPPPKPAERHKDDSRGLVLPGYKYLGPFNGLDKGEP |
| NO: 105 | VNEADAAALEHDKAYDRQLDSGDNPYLKYNHADAEFQERLKEDTSFGGNLGRAVFQAKKRVLE |
| (AAV | PLGLVEEPVKTAPGKKRPVEHSPVEPDSSSGTGKAGNQPARKRLNFGQTGDADSVPDPQPLGQ |
| hu.57 | PPAAPSGLGTNTMATGSGAPMADNNEGADGVGNSSGDWHCDSTWMGDRVITTSTRTWALP |
| (AAS9930 | TYNNHLYKQISSQSGASNDNHYFGYSTPWGYFDFNRFHCHFSPRDWQRLINNNWGFRPKRLNL |
| 4)) | KLFNIQVKEVTQNDGTTTIANNLTSTVQVFTDLEYQLPYVLGSAHQGCLPPFPADVFMVPQYGYL |
| | TLNNGSQAVGRSSFYCLEYFPSQMLRTGNNFTFSYTFEDVPFHSSYAHSQSLDRLMNPLIDQYLY |
| | YLSRTNTPSGTTTQSRLQFSQAGASDIRDQSRNWLPGPCYRQQRVSKTAADNNNGEYSWTGAT |
| | KYHLNGRDSLVNPGPAMASHKDDEEKFFPQSGVLIFGKQGSEKTNVDIEKVMITDEEEIRTTNPV |
| | ATEQYGSVSTNLQSGNTRAATSDVNTQGVLPGMVWQDRDVYLQGPIWAKIPHTDGHFHPSPL |
| | MGGFGLKHPPPQILIKNTPVPANPSTTFSAAKFASFITQYSTGQVSVEIEWELQKENSKRWNPEIQ |
| | YTSNYNKSVNVDFTVDTNGVYSEPRPIGTRYLTRNL |
| SEQ ID | MAADGYLPDWLEDTLSEGIRQWWKLKPGPPPPKPAERHKDDSRGLVLPGYKYLGPFNGLDKGE |
| NO: 106 | PVNEADAAALEHDKAYDRQLDSGDNPYLKYNHADAEFQERLKEDTSFGGNLGRAVFQAKKRVL |
| (AAV | EPLGLVEEPVKTAPGKKRPVEHSPVEPDSSSGTGKAGQQPARKRLNFGQTGDADSVPDPQPLG |
| hu.60 | QPPAAPSGLGSTTMATGSGAPMADNNEGADGVGNSSGNWHCDSQWLGDRVITTSTRTWAL |
| (AAS9930 | PTYNNHLYKQISSQSGASNDNHYFGYSTPWGYFDFNRFHCHFSPRDWQRLINNNWGFRPKRLN |
| 7)) | FKLFNIQVKEVTQNDGTTTIANNLTSTVQVFTDSEYQLPYVLGSAHQGCLPPFPADVFMVPQYGY |
| | LTLNNGSQAVGRSSFYCLEYFPSQMLRTGNNFQFSYTFEDVPFHSSYAHSQSLDRLMNPLVDQYL |
| | YYLNKTQTNSGTLQQSRLLFSQAGPTNMSLQAKNWLPGPCYRQQRLSKQANDNNNSNFPWTA |
| | ATKYHLNGRDSLVNPGPAMASHKDDEEKFFPMHGTLIFGKQGTNANDADLENVMITDEEEIRTT |
| | NPVATEQYGTVSNNLQNSNTGPTTGTVNHQGALPGMVWQDRDVYLQGPIWAKIPHTDGHFH |
| | PSPLMGGFGLKHPPPQIMIKNTPVPANPPTNFSSAKFASFITQYSTGQVSVEIEWELQKENSKRW |
| | NPEIQYTSNYNKSVNVDFTVDTNGVYSEPRPIGTRYLTRNL |
| SEQ ID | MAADGYLPDWLEDTLSEGIRQWWKLKPGPPPPKPAERHKDDSRGLVLPGYKYLGPFNGLDKGE |
| NO: 107 | PVNEADAAALEHDKAYDRQLDSGDNPYLKYNHADAEFQERLKEDTSFGGNLGRAVFQAKKRVL |
| (AAV | EPLGLVEEPVKTAPGKKRPVEHPPVEPDSSSGTGKAGQQPARKRLNFGQTGDADSVPDPQPLG |
| hu.61 | QPPAAPSGLGSTTMATGSGAPMADNNEGADGVGNSSGNWHCDSQWLGDRVITTSTRTWAL |
| (AAS9930 | PTYNNHLYKQISSQSGASNDNHYFGYSTPWGYFDFNRFHCHFSPRDWQRLINNNWGFRPKRLN |
| 8)) | FKLFNIQVKEVTQNDGTTTIANNLTSTVQVFTDSEYQLPYVLGSAHQGCLPPFPADVFMVPQYGY |
| | LTLNNGSQAVGRSSFYCLEYFPSQMLRTGNNFQFSYTFEDVPFHSSYAHSQSLDRLMNPLIDQYL |
| | YYLNKTQTNSGTLQQSRLLFSQAGPTNMSLQAKNRLPGPCYRQQRLSKQANDNNNSNFPWTA |
| | ATKYHLNGRDSLVNPGPAMASHKDDEEKFFPMHGTLIFGKQGTNANDADLENVMITDEEEIRTT |
| | NPVATEQYGTVSNNLQNSNTGPTTGTVNHQGALPGMVWQDRDVYLQGPIWAKIPHTDGHFH |
| | PSPLVGGFGLKHPPPQIMIKNTPVPANPPTNFSSAKFASFITQYSTGQVSVEIEWELQKENSKRW |
| | NPEIQYTSNYNKSVNVDFTVDTNGVYSEPRPIGTRYLTRNL |
| SEQ ID | MAADGYLPDWLEDTLSEGIRQWWKLKPGPPPPKPAERHKDDSRGLVLPGYKYLGPFNGLDKGE |
| NO: 108 | PVNEADAAALEHDKAYDRQLDSGDNPYPKYNHADAEFQERLKEDTSFGGNLGRAVFQAKKRVL |
| (AAV | EPLGLVEEPVKTAPGKKRPVEHSPAEPDSSSGTGKAGQQPARKRLNFGQTGDADSVPDPQPLG |
| hu.63 | QPPAAPSGLGTNTMATGSGAPMADNNEGADGVGNSSGNWHCDSTWMGDRVITTSTRTWAL |
| (AAS9930 | PTYNNHLYKQISSQSGASNDNHYFGYSTPWGYFDFNRFHCHFSPRDWQRLINNNWGFRPKRLN |
| 9)) | FKLFNIQVKEVTQNDGTTTIANNLTSTVQVFTDSEYQLPYVLGSAHQGCLPPFPADVFMVPQYGY |
| | LTLNNGSQAVGRSSFYCLEYFPSQMLRTGNNFTFSYTFEDVPFHSSYAHSQSLDRLMNPLIDQYLY |
| | YLSRTNTPSGTTTQSRLQFSQAGASDIRDQSRNWLPGPCYRQQRVSKTSADNNNSEYSWTGAT |
| | KYHLNGRDSLVNPGPAMASHKDDEEKFFPQSGVLIFGKQDSGKTNVDIEKVMITDEEEIRTTNPV |
| | ATEQYGSVSTNLQSGNTQAATSDVNTQGVLPGMVWQDRDVYLQGPIWAKIPHTDGHFHPSPL |
| | MGGFGLKHPPPQILIKNTPVPANPSTTFSAAKFASFITQYSTGQVSVEIEWELQKENSKRWNPEIQ |
| | YTSNYNKSVNVDFTVDTNGVYSEPRPIGTRYLTRNL |
| SEQ ID | MAADGYLPDWLEDNLSEGIREWWDLKPGAPKPKANQQKQDDGRGLVLPGYKYLGPFNGLDK |
| NO: 109 | GEPVNAADAAALEHDKAYDQQLKAGDNPYLRYNHADAEFQERLQEDTSFGGNLGRAVFQAKK |
| (AAV | RVLEPLGLVEEAAKTAPGKKRPVEPSPQRSPDSSAGIGKKGQQPAKKRLNFGQTGDSESVPDPQP |
| hu.66 | IGEPPAGPSGLGSGTMAAGGGAPMADNNEGADGVGSSSGNWHCDSTWLGDRVITTSTRTWA |
| (AAS9931 | LPTYNNHLYKQISNGTSGGSTNDNTYFGYSTPWGYFDFNRFHCHFSPRDWQRLINNNWGFRPK |
| 1)) | RLSFKLFNIQVKEVTQNEGTETIANNLTSTIQVFTDSEYQLPYVLGSAHQGCLPPFPADVFMIPQY |
| | GYLTLNNGSQAVGRSSFYCLEYFPSQMLRTGNNFEFSYTFEDVPFHSSCAHSQSSDRLMNPLIDQ |
| | YLYYLSRTRSTGGTQGTQQLLFSQAGPANMSAQAKNWLPGPCYRQQRVSTTLSQNNNSNFAW |
| | TGATKYHLNGRDSLVNPGVAMATHKDDEERFFPSSGVLMFGKQGAGRDNVDYSSVMLTSEEEI |
| | KTTNPVATEQYGVVADNLQQTNTGPIVGNVNSQGALPGMVWQNRDVYLQGPIWAKIPHTDG |
| | NFHPSPLMGGFGLKHPPPQILIKNTPVPADPPTTFSQAKLASFITQYSTGQVSVEIEWELQKENSK |
| | RWNPEIQYTSNYYKSTNVDFAVNTEGTYSEPRPIGTRYLTRNL |
| SEQ ID | MAADGYLPDWLEDNLSEGIREWWDLKPGAPKPKANQQKQDDGRGLVLLGYKYLGPFNGLDK |
| NO: 110 | GEPVNAADAAALEHDKAYDQQLKAGDNPYLRYNHADAEFQERLQEDTSFGGNLGRAVFQAKK |
| (AAV | RVLEPLGLVEEAAKTAPGKKRPVEPSPQRSPDSSTGIGKKGQQPAKKRLNFGQTGDSESVPDPQP |
| hu.67 | IGEPPAGPSGLGSGTMAAGGGAPMADNNEGADGVGSSSGNWHCDSTWLGDRVITTSTRTWA |
| (AAS9931 | LPTYNNHLYKQISNGTSGGSTNDNTYFGYSTPWGYFDFNRFHCHFSPRDWQRLINNNWGFRPK |
| 2)) | RLSFKLFNIQVKEVTQNEGTKTIANNLTSTIQVFTDSEYQLPYVLGSAHQGCLPPFPADVFMIPQY |
| | GYLTLNNGSQAVGRSSFYCLEYFPSQMLRTGNNFEFSYTFEDVPFHSGYAHSQSLDRLMNPLIDQ |
| | YLYYLSRTQSTGGTQGTQQLLFSQAGPANMSAQAKNWLPGPCYRQQRVSTTLSQNNNSNFAW |
| | TGATKYHLNGRDSLVNPGVAMATHKDDEERFFPSSGVLMFGKQGAGRDNVDYSSVMLTSEEEI |
| | KTTNPVATEQYGVVADNLQQTNTGPIVGNVNSQGALPGMVWQNRDVYLQGPIWAKIPHTDG |
| | NFHPSPLMGGFGLKHPPPQILIKNTPVPADPPTTFSQAKLASFITQYSTGQVSVEIEWELQKENSK |
| | RWNPEIQYTSNYYKSTNVDFAVNTEGTYSEPRPIGTRYLTRNL |
| SEQ ID | MAADGYLPDWLEDNLSEGIREWWDLKPGAPKPKANQQKQDDGRGLVLPGYKYLGPFNGLDK |
| NO: 111 | GEPVNAADAAALEHDKAYDQQLKAGDNPYLRYNHADAEFQERLQEDTSFGGNLGRAVFQAKK |
| (AAV | RVLEPLGLVEEGAKTAPGKKRPVEPSPQRSPDSSTGIGKKGQQPAKKRLNFGQTGDSESVPDPQP |
| rh.10 | IGEPPAGPSGLGSGTMAAGGGAPMADNNEGADGVGSSSGNWHCDSTWLGDRVITTSTRTWA |
| (AAO882 | LPTYNNHLYKQISNGTSGGSTNDNTYFGYSTPWGYFDFNRFHCHFSPRDWQRLINNNWGFRPK |
| 01)) | RLNFKLFNIQVKEVTQNEGTKTIANNLTSTIQVFTDSEYQLPYVLGSAHQGCLPPFPADVFMIPQY |
| | GYLTLNNGSQAVGRSSFYCLEYFPSQMLRTGNNFEFSYQFEDVPFHSSYAHSQSLDRLMNPLIDQ |
| | YLYYLSRTQSTGGTAGTQQLLFSQAGPNNMSAQAKNWLPGPCYRQQRVSTTLSQNNNSNFAW |
| | TGATKYHLNGRDSLVNPGVAMATHKDDEERFFPSSGVLMFGKQGAGKDNVDYSSVMLTSEEEI |
| | KTTNPVATEQYGVVADNLQQQNAAPIVGAVNSQGALPGMVWQNRDVYLQGPIWAKIPHTDG |
| | NFHPSPLMGGFGLKHPPPQILIKNTPVPADPPTTFSQAKLASFITQYSTGQVSVEIEWELQKENSK |
| | RWNPEIQYTSNYYKSTNVDFAVNTDGTYSEPRPIGTRYLTRNL |
| SEQ ID | MAADGYLPDWLEDNLSEGIREWWDLKPGAPKPKANQQKQDDGRGLVLPGYKYLGPFNGLDK |
| NO: 112 | GEPVNEADAAALEHDKAYDKQLEQGDNPYLKYNHADAEFQERLQEDTSFGGNLGRAVFQAKKR |
| (AAV | VLEPLGLVEEGAKTAPGKKRPIESPDSSTGIGKKGQQPAKKKLNFGQTGDSESVPDPQPLGEPPA |
| rh.13 | APSGLGSGTMAAGGGAPMADNNEGADGVGNASGNWHCDSTWLGDRVITTSTRTWALPTYN |
| (AAO881 | NHLYKQISSQSGATNDNHFFGYSTPWGYFDFNRFHCHFSPRDWQRLINNNWGFRPRKLRFKLF |
| 99)) | NIQVKEVTTNDGVTTIANNLTSTIQVFSDSEYQLPYVLGSAHQGCLPPFPADVFMIPQYGYLTLNN |
| | GSQSVGRSSFYCLEYFPSQMLRTGNNFEFSYTFEEVPFHSSYAHSQSLDRLMNPLIDQYLYYLART |
| | QSTTGSTRELQFHQAGPNTMAEQSKNWLPGPCYRQQRLSKNIDSNNNSNFAWTGATKYHLNG |
| | RNSLTNPGVAMATNKDDEDQFFPINGVLVFGETGAANKTTLENVLMTSEEEIKTTNPVATEEYG |
| | VVSSNLQSSTAGPQTQTVNSQGALPGMVWQNRDVYLQGPIWAKIPHTDGNFHPSPLMGGFG |
| | LKHPPPQILIKNTPVPANPPEVFTPAKFASFITQYSTGQVSVEIEWELQKENSKRWNPEIQYTSNY |
| | AKSNNVEFAVNNEGVYTEPRPIGTRYLTRNL |
| SEQ ID | MAADGYLPDWLEDNLSEGIREWWDLKPGAPKPKANQQKQDDGRGLVLPGYKYLGPFNGLDK |
| NO: 113 | GEPVNEADAAALEHDKAYDKQLEQGDNPYLKYNHADAEFQERLQEDTSFGGNLGRAVFQAKKR |
| (AAV | VLEPLGLVEEGAKTAPGKKRPVEPSPQRSPDSSTGIGKTGQQPAKKRLNFGQTGDSESVPDPQPI |
| rh.19 | GEPPAGPSGLGSGTMAAGGGAPMADNNEGADGVGSSSGNWHCDSTWLGDRVITTSTRTWA |
| (AAO881 | LPTYNNHLYKQISNGTSGGSTNDNTYFGYSTPWGYFDFNRFHCHFSPRDWQRLINNNWGFRPR |
| 94)) | KLRFKLFNIQVKEVTTDDGVTTIANNLTSTIQVFSDSEYQLPYVLGSAHQGCLPPFPADVFMIPQY |
| | GYLTLNNGSQSVGRSSFYCLEYFPSQMLRTGNNFEFSYTFEEVPFHSSYAHSQSLDRLMNPLIDQY |
| | LYYLARTQSTTGSTRELQFHQAGPNTMAEQSKNWLPGPCYRQQRLSKNIDSNNNSNFAWTGA |
| | TKYHLNGRNSLTNPGVAMATNKDDEDQFFPINGVLVFGKTGAANKTTLENVLMTSEEEIKTTNP |
| | VATEEYGVVSSNLQSSTAGPQTQTVNSQGALPGMVWQNRDVYLQGPIWAKIPHTDGNFHPSP |
| | LMDGFGLKHPPPQILIKNTPVPANPPEVFTPAKFASFITQYSTGQVSVEIEWELQKENSKRWNPEI |
| | QYTSNYAKSNNVEFAVNNEGVYTEPRPIGTRYLTRNL |
| SEQ ID | MAADGYLPDWLEDNLSEGIREWWDLKPGAPKPKANQQKQDDGRGLVLPGYKYLGPFNGLDK |
| NO: 114 | GEPVNAADAAALEHDKAYDQQLKAGDNPYLRYNHADAEFQERLQEDTSFGGNLGRAVFQAKK |
| (AAV | RVLEPLGLVEEGAKTAPGKKRPIESPDSSTGIGKKGQQPAKKKLNFGQTGDSESVPDPQPIGEPPA |
| rh.22 | GPSGLGSGTMAAGGGAPMADNNEGADGVGNASGNWHCDSTWLGDRVITTSTRTWALPTYN |
| (AAO881 | NHLYKQISSQSGATNDNHFFGYSTPWGYFDFNRFHCHFSPRDWQRLINNNWGFRPRKLRFKLF |
| 92)) | NIQVKEVTTNDGVTTIANNLTSTIQVFSDSEYQLPYVLGSAHQGCLPPFPADVFMIPQYGYLTLNN |
| | GSQSVGRSSFYCLEYFPSQMLRTGNNFEFSYTFEEVPFHSSYAHSQSLDRLMNPLIDQYLYYLART |
| | QSTTGSTRELQFHQAGPNTMAEQSKNWLPGPCYRRQRLSKDIDSNNNSNFAWTGATKYHLNG |
| | RNSLTNPGVAMATNKDDEDQFFPINGVLVFGKTGAANKTTLENVLMTSEEEIKTTNPVATEEYG |
| | VVSSNLQSSTAGPQTQTVNSQGALPGMVWQNRDVYLQGPIWAKIPHTDGNFHPSPLMGGFG |
| | LKHPPPQILIKNTPVPANPPEVFTPAKFASFITQYSTGQVSVEIEWELQKENSKRWNPEIQYTSNY |
| | AKSNNVEFAVNNEGVYTEPRPIGTRYLTRNL |
| SEQ ID | MAADGYLPDWLEDNLSEGIREWWDLKPGAPKPKANQQKQDDGRGLVLPGYKYLGPFNGLDK |
| NO: 115 | GEPVNEADAAALEHDKAYDKQLEQGDNPYLKYNHADAEFQERLQEDTSFGGNLGRAVFQAKKR |
| (AAV | VLEPLGLVEEGAKTAPGKKRPVEPSPQRSPDSSTGIGKTGQQPAKKRLNFGQTGDSESVPDPQPI |
| rh.23 | GEPPAGPSGLGSGTMAAGGGAPMADNNEGADGVGSSSGNWHCDSTWLGDRVITTSTRTWA |
| (AAO881 | LPTYNNHLYKQISNGTSGGSTNDNTYFGYSTPWGYFDFNRFHCHFSPRDWQRLINNNWGFRPK |
| 91)) | RLNFKLFNIQVKEVTQNEGTKTIANNLTSTIQVFTDSEYQLPYVLGSAHQGCLPPFPADVFMIPQY |
| | GYLTLNNGSQAVGRSSFYCLEYFPSQMLRTGNNFEFSYQFEDVPFHSSYAHSQSLDRLTNPLIDQY |
| | LYYLARTQSTTGSTRGLQFHQAGPNTMAEQSKNWLPGPCYRQQRLSKNIDSNNNSNFAWTGA |
| | TKYHLNGRNSLTNPGVAMATNKDDEDQFFPINGVLVFGKTGAANKTTLENVLMTSEEEIKTTNP |
| | VATEEYGVVSSNLQSSTAGPQTQTVNSQGALPGMVWQNRDVYLQGPIWAKIPHTDGNFHPSP |
| | LMGGFGLKHPPPQILIKYTSNYYKSTNVDFAVNTEGTYSEPRPIGTRYLTRNL |
| SEQ ID | MAADGYLPDWLEDNLSEGIREWWDLKPGAPKPKANQQKQDDGRGLVLPGYKYLGPFNGLDK |
| NO: 116 | GEPVNAADAAALEHDKAYDQQLKAGDNPYLRYNHADAEFQERLQEDTSFGGNLGRAVFQAKK |
| (AAV | RVLEPLGLVEEGAKTAPGKKRPIESPDSSTGIGKKGQQPAKKKLNFGQTGDSESVPDPQPIGEPPA |
| rh.24 | GPSGLGSGTMAAGGGAPMADNNEGADGVGSSSGNWHCDSTWLGDRVITTSTRTWALPTYN |
| (AAO881 | NHLYKQISNGTSGGSTNDNTYFGYSTPWGYFDFNRFHCHFSPRDWQRLINNNWGFRPKRLNFK |
| 90)) | LFNIQVKEVTQNEGTKTIANNLTSTIQVFTDSEYQLPYVLGSAHQGCLPPFPADVFMIPQYGYLTL |
| | NNGSQAVGRSSFYCLEYFPSQMLRTGNNFEFSYQFEDVPFHSSYAHSQSLDRLMNPLIDQYLYYL |
| | SRTQSTGGTAGTQQLLFSQAGPNNMSAQAKNWLPGPCYRQQRVSTTVSQNNNSNFAWTGAT |
| | KYHLNGRDSLVNPGVAMATHKGDEERFFPSSGVLMFGKQGAGKDNVDYSSVMLTSEEEIKTTN |
| | PVATEQYGVVADNLQQQNAAPIVGAVNSQGALPGMVWQNRDVYLQGPIWAKIPHTDGNFHP |
| | SPLMGGFGLKHPPPQILIKNTPVPADPPTTFSQAKLASFITQYSTGQVSVEIEWELQKENSKRWN |
| | PEIQYTSNYYKSTNVDFAVNTEGTYSEPRPIGTRYLTRSL |
| SEQ ID | MAADGYLPDWLEDNLSEGIREWWDLKPGAPKPKANQQKQDDGRGLVLPGYKYLGPFNGLDK |
| NO: 117 | GEPVNAADAAALEHDKAYDQQLKAGDNPYLRYNHADAEFQERLQEDTSFGGNLGRAVFQAKK |
| (AAV | RVLEPLGLVEEGAKTAPGKKRPIDSPDSSTGIGKKGQQPAKKKLNFGQTGDSESVPDPQPLGEPP |
| rh.35 | AAPSSVGSGTMAAGGGAPMADNNEGADGVGNASGNWHCDSTWLGDRVITTSTRTWALPTY |
| (AAO881 | NNHLYKQISSSSSGATNDNHYFGYSTPWGYFDFNRFHCHFSPRDWQRLINNNWGFRPKKLRFK |
| 86)) | LFNIQVKEVTTNDGVTTIANNLTSTVQVFSDSEYQLPYVLGSAHQGCLPPFPADVFMIPQYGYLTL |
| | NNGSQSVGRSSFYCLEYFPSQMLRTGNNFEFSYSFEDVPFHSSYAHSQSLDRLMNPLIDQYLYYLA |
| | RTQSTTGSTRELQFHQAGPNTMAEQSKNWLPGPCYRQQGLSKNLDFNNNSNFAWTAATKYHL |
| | NGRNSLTNPGIPMATNKDDEDQFFPINGVLVFGKTGAANKTTLENVLMTSEEEIKTTNPVATEEY |
| | GVVSSNLQPSTAGPQSQTINSQGALPGMVWQNRDVYLQGPIWAKIPHTDGNFHPSPLMGGF |
| | GLKHPPPQILIKNTPVPANPPEVFTPAKFASFITQYSTGQVSVEIEWELQKENSKRWNPEIQYTSN |
| | YAKSNNVEFAVNPDGVYTEPRPIGTRYLPRNL |
| SEQ ID | MAADGYLPDWLEDNLSEGIREWWDLKPGAPKPKANQQKQDDGRGLVLPGYKYLGPFNGLDK |
| NO: 118 | GEPVNAADAAALEHDKAYDQQLEAGDNPYLRYNHADAEFQERLQEDTSFGGNLGRAVFQAKK |
| (AAV | RVLEPLGLVEEGAKTAPGKKRPVEQSPQEPDSSSGIGKKGQQPARKRLNFGQTGDSESVPDPQPL |
| rh.43 | GEPPAAPSGVGPNTMAAGGGAPMADNNEGADGVGSSSGNWHCDSTWLGDRVITTSTRTWA |
| (AAS9924 | LPTYNNHLYKQISNGTSGGATNDNTYFGYSTPWGYFDFNRFHCHFSPRDWQRLINNNWGFRPK |
| 5)) | RLSFKLFNIQVKEVTQNEGTKTIANNLTSTIQVFTDSEYQLPYVLGSAHQGCLPPFPADVFMIPQY |
| | GYLTLNNGSQAVGRSSFYCLEYFPSQMLRTGNNFQFTYTFEDVPFHSSYAHSQSLDRLMNPLIDQ |
| | YLYYLSRTQTTGGTANTQTLGFSQGGPNTMANQAKNWLPGPCYRQQRVSTTTGQNNNSNFA |
| | WTAGTKYHLNGRNSLANPGIAMATHKDDEERFFPVTGSCFWQQNAARDNADYSDVMLTSEEE |
| | IKTTNPVATEEYGIVADNLQQQNTAPQIGTVNSQGALPGMVWQNRDVYLQGPIWAKIPHTDG |
| | NFHPSPLMGGFGLKHPPPQILIKNTPVPADPPTTFNQSKLNSFITQYSTGQVSVEIEWELQKENSK |
| | RWNPEIQYTSNYYKSTSVDFAVNTEGVYSEPRPIGTRYLTRNL |
| SEQ ID | MAADGYLPDWLEDNLSEGIREWWDLKPGAPKPKANQQKQDDGRGLVLPGYKYLGPFNGLDK |
| NO: 119 | GEPVNAADAAALEHDKAYDQQLKAGDNPYLRYNHADAEFQERLQEDTSFGGNLGRAVFQAKK |
| (AAV | RVLEPLGLVEEAAKTAPGKKRPVEPSPQRSPDSSTGIGKKGQQPARKRLNFGQTGDSESVPDPQP |
| rh.48 | IGEPPAGPSGLGSGTMAAGGGAPMADNNKGADGVGNASGNWHCDSTWLGDRVITTSTRTW |
| (AAS9924 | ALPTYNNHLYKQISSQSAGSTNDNVYFGYSTPWGYFDFNRFHCHFSPRDWQRLINSNWGFRPK |
| 6)) | KLNFKLFNIQVKEVTTNDGVTTIANNLTSTVQVFSDSEYQLPYVLGSAHQGCLPPFPADVFMIPQY |
| | GYLTLNNGSQSVGRSSFYCLEYFPSQMLRTGNNFTFSYTFEDVPFHSSYAHSQSLDRLMNPLIDQ |
| | YLYYLARTQSNAGGTAGNRELQFYQGGPTTMAEQAKNWLPGPCFRQQRVSKTLDQNNNSNFA |
| | WTGATKYHLNGRNSLVNPGVAMATHKDDEERFFPSSGVLIFGKTGAANKTTLENVLMTNEEEIR |
| | PTNPVATEEYGTVSSNLQAANTAAQTQVVNNQGALPGMVWQNRDVYLQGPIWAKIPHTDGN |
| | FHPSPLMGGFGLKHPPPQILIKNTPVPANPPEVFTPAKFASFITQYSTGQVSVEIEWELQKENSKR |
| | WNPEIQYTSNFDKQTGVDFAVDSQGVYSEPRPIGTRYLTRNL |
| SEQ ID | MAADGYLPDWLEDNLSEGIREWWDLKPGAPKPKANQQKQDDGRGLVLPGYKYLGPFNGLDK |
| NO: 120 | GEPVNAADAAALEHDKAYDQQLKAGDNPHLRYNHADAEFQERLQEDTSFGGNLGRAVFQAKK |
| (AAV | RVLEPLGLVEEGAKTAPGKKRPVEPSPQRSPDSSTGIGKKGQQPARKRLNFGQTGDSESVPDPQL |
| rh.49 | IGEPPAAPSSVGSGTMAAGGGAPMADNNEGADGVGSSSGNWHCDSTWLGDRVITTSTRTWA |
| (AAS9924 | LPTYNNHLYKQISNGTSGGSTNDNTYFGYSTPWGYFDFNRFHCHFSPRDWQRLINNNWGFRPK |
| 7)) | RLSFKLFNIQVKEVTQNEGTKTIANNLTSTIQVFTDSEYQLPYVLGSAHQGCLPPFPADVFMIPQY |
| | GNLTLNNGSQAVGRSSFYCLEYFPSQMLRTGNNFSFSYTFEDVPFHSSYAHSQSLDRLMNPLIDQ |
| | YLYYLSRTQSTGGTAGTQQLLFSQAGPSNMSAQARNWLPGPCYRQQRVSTTLSQNNNSNFAW |
| | TGATKYHLNGRDSLVNPGVAMATNKDDEDRFFPSSGILMFGKQGAGKDNMGYSNVMLTSEEE |
| | IKTTNPVATEQYGVVADNLQQQNTAPIVGAVNSQGALPGMVWQNRDVYLQGPIWAKIPHTD |
| | GNFHPSPLMGGFGLKHPPPQILIKNTPVPADPPTAFNQAKLNSFITQYGTGQVSVEIEWELQKEN |
| | SKRWNPEIQYTSNYYKSTNVDFAVNTEGVYSEPRPIGTRYLTRNL |
| SEQ ID | MAADGYLPDWLEDNLSEGIREWWDLKPGAPKPKANQQKQDDGRGLVLPGYKYLGPFNGLDK |
| NO: 121 | GEPVNAADAAALEHDKAYDQQLKAGDNPYLRYNHADAEFQERLQEDTSFGGNLGRAVFQAKK |
| (AAV | RVLEPLGLVEEGAKTAPGKKRPVEPSPQRSPDSSTGIGKKGQQPAGKRLNFGQTGDSESVPDPQ |
| rh.50 | PIGEPPAAPSSVGSGTMAAGGGAPMADNNEGADGVGSSSGNWHCDSTWLGDRVITTSTRTW |
| (AAS9924 | ALPTYNNHLYKQISNGTSGGSTNDNTYFGYSTPWGYFDFNRFHCHFSPRDWQRLINNNWGFRP |
| 8)) | KRLSFKLFNIQVKEVTQNEGTKTIANNLTSTIQVFTDSEYQLPYVLGSAHQGCLPPFPADVFMIPQ |
| | YGYLTLNNGSQAVGRSSFYCLEYFPSQMLRTGNNFSFSYTFEDVPFHSSYAHSQSLDRLMNPLVD |
| | QYLYYLSRTQSTGGTAGTQQLLFSQAGPSNMSAQARNWLPGPCYRQQRVSTTLSQNNNSNFA |
| | WTGATKYHLNGRDSLVNPGVAMATNKDDEDRFFPSSGILMFGKQGAGKDNVDYSNVMLTSEE |
| | EIKTTNPVATEQYGVVADNLQQQNTAPIVGAVNSQGALPGMVWQNRDVYLQGPIWAKIPHTD |
| | GNFHPSPLMGGFGLKHPPPQILIKNTPVPADPPTAFNQAKLNSFITQYSTGQVSVEIEWELQKEN |
| | SKRWSPEIQYTSNYYKSTNVDFAVNTEGVYSEPRPIGTRYLTRNL |
| SEQ ID | MVADGYLPDWLEDNLSEGIREWWDLKPGAPKPKANQQKQGDGRGLVLPGYKYLGPFNGLDK |
| NO: 122 | GEPVNAADAAALEHDKAYDQQLKAGDNPYLRYNHADAELQERLQEDTSFGGNLGRAVFQAKK |
| (AAV | RVLEPLGLVEEGAKTAPGKKRPVEPSPQRSPDSSTGIGKKGQQPARKRLNFGQTGDSESVPDPQP |
| rh.51 | IGEPPAAPSSVGSGTMAAGGGAPMADNNEGADGVGSSSGNWHCDSTWLGDRVITTSTRTWA |
| (AAS9924 | LPTYNNHLYKQISNGTSGGSTNDNTYFGYSTPWGYFDFNRFHCHFSPRDWQRLINNNWGFRPK |
| 9)) | RLSFKLFNIQVKEVTQNEGTKTIANNLTSTIQVFTDSEYQLPYVLGSAHQGCQPPFPADVFMIPQY |
| | GYLTLNNGSQAVGRSSFYCLEYFPSQMLRTGNNFSFSYTFEDVPFHSSYAHSQSLDRLMNPLIDQ |
| | YLYYLSRTQSTGGTAGTQQLLFSQAGPSNMSAQARNWLPGPCYRQQRVSTTLSQNNNSNFAW |
| | TGATKYHLNGRDSLVNPGVAMATNKDDEDRFFPSSGILMFGKQGAGKDNVDYSNVMLTSEEEI |
| | KTTNPVATEQYGVVADNLQQQNTAPIVGAVNSQGALPGMVWQNRDVYLQGPIWAKIPHTDG |
| | NFHPSPLMGGFGLKHPPPQILIKNTPVPADPPTAFNQAKLNSFITQYSTGQVSVEIEWEPQKENS |
| | KRWNPEIQYTSNYYKSTNVDFAVNTEGVYSEPRPIGTRYLTRNL |
| SEQ ID | MAADGYLPDWLEDNLSEGIREWWDLKPGAPKPKANQQKQDDGRGLVLPGYKYLGPFNGLDK |
| NO: 123 | GEPVNAADAAALEHDKAYDQQLKAGDNPYLRYNHADAEFQERLQEDTSFGGNLGRAVFQAKK |
| (AAV | RVLEPLGLVEEGAKTAPGKKRPVEPSPQRSPDSSTGIGKKGQQPARKRLNFGQTGDSESVPDPQP |
| rh.52 | IGEPPAAPSSVGSGTMAAGGGAPMADNNEGADGVGSSSGNWHCDSTWLGDRVITTSTRTWA |
| (AAS9925 | LPTYNNHLYKQISNGTSGGSTNDNTYFGYSTPWGYFDFNRFHCHFSPRDWQRLINNNWGFRPK |
| 0)) | RLSFKLFNIQVKEVTQNEGTKTIANSLTSTIQVFTDSEYQLPYVLGSAHQGCLPPFPADVFMIPQYG |
| | YLTPNNGSQAVGRSSFYCLEYFPSQMLRTGNNFSFSYTFEDVPFHSSYAHSQSLDRLMNPLIDQY |
| | LYYLSRTQSTGGTAGTQQLLSSQAGPSNMSAQARNWLPGPCYRQQRVSTTLSQNNNSNFAWT |
| | GATKYHLNGRDSLVNPGVAMATNKDDEDRFFPSSGILMFGKQGAGKDNVDYSNVMLTSEEEIK |
| | TTNPVATEQYGVVADNLQQQNTAPIVGAVNSQGALPGMVWQNRDVYLQGPIWAKIPHTDGN |
| | FHPSPLMGGFGLKHPPPQILIKNTPVPADPPTAFNQAKLNSFITQYSTGQVSVEIEWELQKENSKR |
| | WNPEIQYTSNYYKSTNVDFAVNTEGVYSEPRPIGTRYLTRNL |
| SEQ ID | MAADGYLPDWLEDNLSEGIREWWDLKPGAPKPKANQQKQDDGRGLVLPGYKYLGPFNGLDK |
| NO: 124 | GEPVNAADAAALEHDKAYDQQLKAGDNPYLRYNHADAEFQERLQEDTSFGGNLGRAVFQAKK |
| (AAV | RVLEPLGLVEEGAKTAPGKKRPVEPSPQRSPDSSTGIGKKGQQPARKRLNFGQTGDSESVPDPQP |
| rh.53 | IGEPPAAPSSVGSGTMAAGGGAPMADNNEGADGVGSSSGNWHCDSTWLGDRVITTSTRTWA |
| (AAS9925 | LPTYNNHLYKQISNGTSGGSTNDNTYFGYSTPWGYFDFNRFHCHFSPRDWQRLINNNWGFRPK |
| 1)) | RLSFKLFNIQVKEVTQNEGTKTIANNLTSTIQVFTDSEYQLPYVLGSAHQGCLPPFPADVFMIPQY |
| | GYLTLNNGSQAVGRSSFYCLEYFPSQMLRTGNNFSFSYTFEDVPFHSSYVHSQSLDRLMNPLIDQ |
| | YLYYLSRTQSTGGTAGTQQLLFSQAGPSNMSAQARNWLPGPCYRQQRVSTTLSQNNNSNFAW |
| | TGATKYHLNGRDSLVNSGVAMATNKDDEDRFFPSSGILMFGKQGAGKDNVDYSNVMLTSEEEI |
| | KTTNPVATEQYGVVADNLQQQNTAPIVGAVNSQGALPGMVWQNRDVYLQGPIWAKIPHTDG |
| | NFHPSPLMGGFGLKHPPPQILIKNTPVPADPPTAFNQAKLNSFITQYSTGQVSVEIEWELQKENS |
| | KRWNPEIQYTSNYYKSTNVDFAVNTEGVYSEPRPIGTRYPTRNL |
| SEQ ID | MAADGYLPDWLEDNLSEGIREWWDLKPGAPKPKANQQKQDDGRGLVLPGYKYLGPFNGLDK |
| NO: 125 | GEPVNAADAAALEHDKAYDQQLKAGDNPYLRYNHADAEFQERLQEDTSFGGNLGRAVFQAKK |
| (AAV | RVLEPLGLVEEAAKTAPGKKRPVEPSPQRSPDSSTGIGKKGQQPARKRLNFGQTGDSESVPDPQP |
| rh.54 | LGEPPAGPSGLGSGTMAAGGGAPMADNNEGADGVGNASGNWHCDSTWLGDRVITTSTRTW |
| (AAS9925 | ALPTYNNHLYKQISSQSAGSTNDNVYFGYSTPWGYFDFNRFHCHFSPRDWQRLINNNWGFRPK |
| 2)) | KLNFKLFNIQVKEVTTNDGVTTIANNLTSTVQVFSDSEYQLPYVLGSAHQGCLPPFPADVFMIPQY |
| | GYLTLNNGSQSVGRSSFYCLEYFPSQVLRTGNNFTFSYTFEDVPFHSSYAHSQSLDRLMNPLIDQY |
| | LYYLARTQSNPGGTSGNRELQFYQGGPSTMAEQAKNWLPGPCFRQQRVSKTLDQNNNSNFA |
| | WTGATKYHLNGRNSLVNPGVAMATHKDDEDRFFPSSGVLIFGKTGATNKTTLENVLMTNEEEIR |
| | PTNPVATEEYGIVSSNLQAANTAAQTQVVNNQGALPGMVWQNRDVYLQGPIWAKIPHTDGN |
| | FHPSPLMGGFGLKHPPPQILIKNTPVPANPPEVFTPAKFASFITQYSTGQVSVEIEWELQKENSKR |
| | WNPEIQYTSNFDKQTGVDFAVDSQGVYSEPRPIGTRYLTRNL |
| SEQ ID | MAADGYLPDWLEDNLSEGIREWWDLKPGAPKPKANQQKQDDGRGLVLPGYKYLGPFNGLDK |
| NO: 126 | GEPVNAADAAALEHDKAYDQQLKAGDNPYLRYNHADAEFQERLQEDTSFGGNLGRAVFQAKK |
| (AAV | RVLEPLGLVEEGAKTAPGKKRPVEPSPQRSPDSSTGIGKKGQQPARKRLNFGQTGDSESVPDPQP |
| rh.55 | IGEPPAAPSSVGSGTMAAGGGAPMADNNEGADGVGSSSGNWHCDSTRLGDRVITTSTRTWAL |
| (AAS9925 | PTYNNHLYKQISSQSAGSTNDNVYFGYSTPWGYFDFNRFHCHFSPRDWQRLINNNWGFRPKKL |
| 3)) | NFKLFNIQVKEVTTNDGVTTIANNLTSTVQVFSDSEYQLPYVLGSAHQGCLPPFPADVFMIPQYG |
| | YLTLNNGSQSVGRSSFYCLEYFPSQMLRTGNNFTFSYTFEDVPFHSSYAHSQSLDRLMNPLIDQYL |
| | YYLARTQSNAGGTAGNRELQFYQGGPTTMAEQAKNWLPGPCFRQRRVSKTLDQNNNSNFAW |
| | TGATKYHLNGRNSLVNPGVAMATHKDDEERFFPSSGVLIFGKTGAANKTTLENVLMTNEEEIRPT |
| | NPVATEEYGTVSSNLQAANTAAQTQVVNNQGALPGMVWQNRDVYLQGPIWAKIPHTDGNFH |
| | PSPLMGGFGLKHPPPQILIKNTPVPANPPEVFTPAKFASFITQYSTGQVSVEIEWELQKENSKRW |
| | NPEIQYTSNFDKQTGVDFAVDSQGVYSEPRPIGTRYLTRNL |
| SEQ ID | MAADGYLPDWLEDNLSEGIREWWALKPGAPKPKANQQKQDDGRGLVLPGYKYLGPFNGLDK |
| NO: 127 | GEPVNAADAAALEHDKAYDQQLQAGDNPYLRYNHADAEFQERLQEDTSFGGNLGRAVFQAKK |
| (AAV | RVLEPLGLVEEGAKTAPGKKRPVEPSPQRSPDSSTGIGKKGQQPARKRLNFGQTGDSESVPDPQP |
| rh.57 | IGEPPAAPSSVGSGTMAAGGGAPMADNNEGADGVGSSSGNWHCDSTWLGDRVITTSTRTWA |
| (AAS9925 | LPTYNNHLYKQTSNGTSGGSTNDNTYFGYSTPWGYFDFNRFHCHFSPRDWQRLINNNWGFRP |
| 4)) | KRLSFKLFNIQVKEVTQNEGTKTIANNLTSTIQVFTDSEYQLPYVLGSAHQGCLPPFPADVFMIPQ |
| | YGYLTLNNGSQAVGRSSFYCLEYFPSQMLRTGNNFSFSYTFEDVPFHSSYAHSQSLDRLMNPLID |
| | QYLYYLSRTQSTGGTAGTQQLLFSQAGPSNMSAQARNWLPGPCYRQQRVSTTLSQNNNSNFA |
| | WTGATKYHLNGRDSLVNPGVAMATNKDDEDRFFPSSGILMFGKQGAGKDNVDYSNVMLTSEE |
| | EIKTTNPVATEQYGVVADNLQQQNTAPIVGAVNSQGALPGMVWQNRDVYLQGPIWAKIPHTD |
| | GNFHPSPLMGGFGLKHPPPQILIKNTPVPADPPTAFNQAKLNSFITQYSTGQVSAEIEWELQKEN |
| | SKRWNPEIQYTSNYYKSTNVDFAVNTEGVYSEPRPIGTRYLTRNL |
| SEQ ID | MAADGYLPDWLEDNLSEGIREWWDLKPGAPKPKANQQKQDDGRGLVLPGYKYLGPFNGLDK |
| NO: 128 | GEPVNAADAAALEHDKAYDQQLKAGDNPYLRYNHADAEFQERLQEDTSFGGNLGRAVFQAKK |
| (AAV | RVLEPLGLVEEAAKTAPGKKRPVEPSPQRSPDSSTGIGKKGQQPARKRLNFGQTGDSESVPDPQP |
| rh.58 | IGEPPAAPSSVGSGTMAAGGGAPMADNNEGADGVGSSSGNWHCDSTWLGDRVITTSTRTWA |
| (AAS9925 | LPTYNNHLYKQISNGTSGGSTNDNTYFGYSTPWGYFDFNRFHCHFSPRDWQRLINNNWGFRPK |
| 5)) | RLSFKLFNIQVKEVTQNEGTKTIANNLTSTIQVFTDSEYQLPYVLGSAHQGCLPPFPADVFMIPQY |
| | GYLTLNNGSQAVGRSSFYCLEYFPSQMLRTGNNFSFSYTFEDVPFHSSYAHSQSLDRLMNPLIDQ |
| | YLYYLSRTQSTGGTAGTQQLLFSQAGPSNMSAQARNWLPGPCYRQQRVSTTLSQNNNSNFAW |
| | TGATKYHLNGRDSLVNPGVAMATNKDDEDRFFPSSGILMFGKQGAGKDNVDYSNVMLTSEEEI |
| | KTTNPVATEQYGVVADNLQQQNTAPIVGAVNSQGALPGMVWQNRDVYLQGPIWAKIPHTDG |
| | NFHPSPLMGGFGLKHPPPQILIKSTPVPADPPTAFNQAKLNSFITQYSTGQVSVEIEWELQKENSK |
| | CWNPEIQYTSNYYKSTNVDFAVNTEGVYSEPRPIGTRYLTRNL |
| SEQ ID | MAADGYLPDWLEDNLSEGIREWWDLKPGAPKPKANQQKQDDGRGLVLPGYKYLGPFNGLDK |
| NO: 129 | GEPVNAADAAALEHDKAYDQQLKAGDNPYLRYNHADAEFQERLQEDTSFGGNLGRAVFQAKK |
| (AAV | RVLEPLGLAEEAAKTAPGKKRPVEPSPQRSPDSSTGIGKKGQQPARKRLNFGQTGDSESVPDPQP |
| rh.62 | IGEPPAGPSGLGSGTMAAGGGAPMADNNKGADGVGNASGNWHCDSTWLGDRVITTSTRTW |
| (AAS9925 | ALPTYNNHLYKQISSQSAGSTNDNVYFGYSTPWGYFDFNRFHCHFSPRDWQRLINNNWGFRPK |
| 8)) | KLNFKLFNIQVKEVTTGDGVTTIANNLTSTVQVFSDSEYQLPYVLGSAHQGCLPPFPADVFMIPQY |
| | GYLTLNNDSQSVGRSSFYCLEYFPSQMLRTGNNFTFSYTFEDVPFHSSYAHSQSLDRLMNPLIDQ |
| | YLYYLARTQSNAGGTAGNRELQFYQGGPTTMAEQAKNWLPGPCFRQQRVSKTLDQNNNSNFA |
| | WTGATKYHLNGRNSLVNPGVAMATHKDDEERFFPSSGVLIFGKTGAANKTTLENVLMTNEEEIR |
| | PTNPVATEEYGTVSSNLQAANTAAQTQVVNNQGALPGMVWQNRDVYLQGPIWAKIPHTDGN |
| | FHPSPLMGGFGLKHPPPQILIKNTPVPANPPEVFTPAKFASFITQYSTGQVSVEIEWELQKENSKR |
| | WNPEIQYTSNFDKQTGVDFAVDSQGVYSEPRPIGTRYLTRNL |
| SEQ ID | MAADGYLPDWLEDNLSEGIREWWDLKPGAPKPKANQQKQDDGRGLVLPGYKYLGPFNGLDK |
| NO: 130 | GEPVNAADAAALEHDKAYDQQLKAGDNPYLRYNHADAEFQERLQEDTSFGGNLGRAVFQAKK |
| (AAV | RVLEPLGLVEEGAKTAPGKKRPVEPSPQRSPDSSTGIGKKGQQPARKRLNFGQTGDSESVPDPQP |
| rh.64 | IGEPPAAPSSVGSGTMAAGGGAPMADNNEGADGVGSSSGNWHCDSTWLGDRVITTSTRTWA |
| (AAS9925 | LPTYNNHLYKQISNGTSGGSTNDNTYFGYSTPWGYFDFNRFHCHFSPRDWQRLINNNWGFRPK |
| 9)) | RLSFKLFNIQVKEVTQNEGTKTIANNLTSTIQVFTDSEYQLPYVLGSAHQGCLPPFPADVFMIPQY |
| | GYLTLNNGSQAVGRSSFYCLEYFPSQMLRTGNNFSFSYTFEDVPFHSSYAHSQSLDRLMNPLIDQ |
| | YLYYLSRTQSTGGTAGTQQLLFSQAGPSNMSAQARNWLPGPCYRQQRVSTTLSQNNNSNFAW |
| | TGATKYHLNGRDSLVNPGVAMATNKDDEDRFFPSSGILMFGKQGAGKDNVDYSNVMLTSEEEI |
| | KTTNPVATEQYGVVADNLQQQNTAPIVGAVNSQGALPGMVWQNRDVYLQGPIWAKIPHTDG |
| | NFHPSPLMGGFGLKHPPPQILIKNTPVPADPPTAFNQAKLNSFITQYSTGQVSVEIVWELQKENS |
| | KRRNPEIQYTSNYYKSTNVDFAVNTEGVYSEPRPIGTRYLTRNL |
| SEQ ID | MAADGYLPDWLEDTLSEGIRQWWKLKPGPPPPKPAERHKDDSRGLVLPGYKYLGPFNGLDKGE |
| NO: 131 | PVNEADAAALEHDKAYDRQLDSGDNPYLKYNHADAEFQERLKEDTSFGGNLGRAVFQAKKRVL |
| (AAV | EPLGLVEEPVKTAPGKKRPVEHSPAEPDSSSGTGKAGQQPARKRLNFGQTGDADSVPDPQPLG |
| rh.56 | QPPAAPSGLGSTTMATGSGAPMADNNEGADGVGNSSGNWHCDSQWLGDRVITTSTRTWAQ |
| (JA40016 | PTYNNHLYKQISSQSGASNDNHYFGYSTPWGYFDFNRFHCHFSPRDWQRLINNNWGFRPKRLN |
| 4)) | FKLFNIQVKEVTQNDGTTTIANNLTSTVQVFTDSEYQLPYVLGSAHQGCLPPFPADVFMVPQYGY |
| | LTLNNGSQAVGRSSFYCLEYFPSQMLRTGNNFQFSYTFEDVPFHSSYAHSQSLDRLMNPLIDQYL |
| | YYLNKTQSNSGALQQSRLLFSQAGPTSMSLQAKNWLPGPCYRQQRLSKQANDNNNSNFPWTA |
| | ATKYHLNGRDSLVNPGPAMASHKDDEEKFFPMHGTLIFGKQGTNANDADLDNVMITDEEEIRT |
| | TNPVATEQYGYVSNNLQNSNTGPTTGTVNHRGALPGMVWQDRDVYLQGPIWAKIPHTDGHF |
| | HPSPLMGGFGLKHPPPQIMIKNTPVPANPPTNFSSAKFASFITQYSTGQVSVEIEWELQKENSKR |
| | WNPEIQYTSNYNKSVNVDFTVDTNGVYSEPRPIGTRYLTRNL |
| SEQ ID | MAADGYLPDWLEDNLSEGIREWWDLKPGAPKPKANQQKQDDGRGLVLPGYKYLGPFNGLD |
| NO: 132 | KGEPVNAADAAALEHDKAYDQQLKAGDNPYLRYNHADAEFQERLQEDTSFGGNLGRAVFQ |
| (Anc80) | AKKRVLEPLGLVEEGAKTAPGKKRPVEQSPQEPDSSSGIGKKGQQPAXKRLNFGQTGDSE |
| | SVPDPQPLGEPPAAPSGVGSNTMAXGGGAPMADNNEGADGVGNASGNWHCDSTWLGDRVI |
| | TTSTRTWALPTYNNHLYKQISSQSGXSTNDNTYFGYSTPWGYFDFNRFHCHFSPRDWQRL |
| | INNNWGFRPKXLNFKLFNIQVKEVTTNDGTTTIANNLTSTVQVFTDSEYQLPYVLGSAHQ |
| | GCLPPFPADVFMIPQYGYLTLNNGSQAVGRSSFYCLEYFPSQMLRTGNNFXFSYTFEDVP |
| | FHSSYAHSQSLDRLMNPLIDQYLYYLSRTQTTSGTAGNRXLQFSQAGPSSMANQAKNWLP |
| | GPCYRQQRVSKTXNQNNNSNFAWTGATKYHLNGRDSLVNPGPAMATHKDDEDKFFPMSGV |
| | LIFGKQGAGNSNVDLDNVMITXEEEIKTTNPVATEXYGTVATNLQSXNTAPATGTVNSQG |
| | ALPGMVWQXRDVYLQGPIWAKIPHTDGHFHPSPLMGGFGLKHPPPQILIKNTPVPANPPT |
| | TFSPAKFASFITQYSTGQVSVEIEWELQKENSKRWNPEIQYTSNYNKSTNVDFAVDTNGV |
| | YSEPRPIGTRYLTRNL |
| | (168) . . . (168) Lys or Arg |
| | (205) . . . (205) Ala or Ser |
| | (266) . . . (266) Ala or Gly |
| | (311) . . . (311) Arg or Lys |
| | (411) . . . (411) Glu or Gln |
| | (460) . . . (460) Thr or Glu |
| | (493) . . . (493) Ala or Thr |
| | (562) . .. (562) Ser or Asn |
| | (576) . . . (576) Gln or Glu |
| | (587) . . . (587) Ser or Ala |
| | (609) . . . (609) Asn or Asp |
| SEQ ID | MAADGYLPDWLEDNLSEGIREWWDLKPGAPKPKANQQKQDDGRGLVLPGYKYLGPFNGLD |
| NO: 133 | KGEPVNAADAAALEHDKAYDQQLKAGDNPYLRYNHADAEFQERLQEDTSFGGNLGRAVFQ |
| (Anc81 | AKKRVLEPLGLVEEGAKTAPGKKRPVEQSPQEPDSSXGIGKKGQQPAXKRLNFGQTGDSE |
| (AKU895 | SVPDPQPLGEPPAAPSGVGSNTMAAGGGAPMADNNEGADGVGNASGNWHCDSTWLGDRVI |
| 96)) | TTSTRTWALPTYNNHLYKQISXXQSGGSTNDNTYFGYSTPWGYFDFNRFHCHFSPRDWQR |
| | LINNNWGFRPKXLNFKLFNIQVKEVTTNDGTTTIANNLTSTVQVFTDSEYQLPYVLGSAH |
| | QGCLPPFPADVFMIPQYGYLTLNNGSQAVGRSSFYCLEYFPSQMLRTGNNFXFSYTFEDV |
| | PFHSSYAHSQSLDRLMNPLIDQYLYYLSRTQTTGGTAGNXXLQFSQAGPSSMANQAKNWL |
| | PGPCYRQQRVSKTTNQNNNSNFAWTGATKYHLNGRDSLVNPGVAMATHKDDEDRFFPSSG |
| | VLIFGKQGAGNXNVDXXNVMITXEEEIKTTNPVATEEYGXVATNLQSXNTAPQTGTVNSQ |
| | GALPGMVWQNRDVYLQGPIWAKIPHTDGNFHPSPLMGGFGLKHPPPQILIKNTPVPANPP |
| | TTFXPAKFASFITQYSTGQVSVEIEWELQKENSKRWNPEIQYTSNYNKSTNVDFAVDTEG |
| | VYSEPRPIGTRYLTRNL |
| | (157) . . . (157) Thr or Ser |
| | (168) . . . (168) Lys or Arg |
| | (262) . . . (262) Asn or Ser |
| | (263) . . . (263) Ser or His |
| | (312) . . . (312) Arg or Lys |
| | (412) . . . (412) Glu or Gln |
| | (460) . . . (460) Arg or Gln |
| | (461) . . . (461) Thr or Glu |
| | (552) . . . (552) Asp or Ser |
| | (556) . . . (556) Leu or Tyr |
| | (557) . . . (557) Asp or Ser |
| | (563) . . . (563) Ser or Asn |
| | (580) . . . (580) Val or Ile |
| | (588) . . . (588) Asn or Ser |
| | (664) . . . (664) Ser or Thr |
| SEQ ID | MAADGYLPDWLEDNLSEGIREWWDLKPGAPKPKANQQKQDDGRGLVLPGYKYLGPFNGLD |
| NO: 134 | KGEPVNAADAAALEHDKAYDQQLKAGDNPYLRYNHADAEFQERLQEDTSFGGNLGRAVFQ |
| (Anc82 | AKKRVLEPLGLVEEGAKTAPGKKRPVEQSPQREPDSSXGIGKKGQQPAXKRLNFGQTGDS |
| (AKU895 | ESVPDPQPLGEPPAAPSGVGSNTMAAGGGAPMADNNEGADGVGNSSGNWHCDSTWLGDR |
| 97)) | V ITTSTRTWALPTYNNHLYKQISNGTSGGSTNDNTYFGYSTPWGYFDFNRFHCHFSPRDWQ |
| | RLINNNWGFRPKRLNFKLFNIQVKEVTTNEGTKTIANNLTSTVQVFTDSEYQLPYVLGSA |
| | HQGCLPPFPADVFMIPQYGYLTLNNGSQAVGRSSFYCLEYFPSQMLRTGNNFQFSYTFED |
| | VPFHSSYAHSQSLDRLMNPLIDQYLYYLSRTQTTGGTAGTQTLQFSQAGPSSMANQAKNW |
| | LPGPCYRQQRVSTTTNQNNNSNFAWTGATKYHLNGRDSLVNPGVAMATHKDDEDRFFPSS |
| | GVLIFGKQGAGNDNVDYSNVMITXEEEIKTTNPVATEEYGVVATNLQSANTAPQTGTVNS |
| | QGALPGMVWQNRDVYLQGPIWAKIPHTDGNFHPSPLMGGFGLKHPPPQILIKNTPVPADP |
| | PTTFNQAKLNSFITQYSTGQVSVEIEWELQKENSKRWNPEIQYTSNYYKSTNVDFAVNTE |
| | GVYSEPRPIGTRYLTRNL |
| | (158) . . . (158) Thr or Ser |
| | (169) . . . (169) Lys or Arg |
| | (564) . . . (564) Ser or Asn |
| SEQ ID | MAADGYLPDWLEDNLSEGIREWWDLKPGAPKPKANQQKQDDGRGLVLPGYKYLGPFNGLD |
| NO: 135 | KGEPVNAADAAALEHDKAYDQQLKAGDNPYLRYNHADAEFQERLQEDTSFGGNLGRAVFQ |
| (Anc83 | AKKRVLEPLGLVEEGAKTAPGKKRPVEQSPQREPDSSXGIGKKGQQPAXKRLNFGQTGDS |
| (AKU895 | ESVPDPQPLGEPPAAPSGVGSNTMAAGGGAPMADNNEGADGVGSSSGNWHCDSTWLGDRV |
| 98)) | ITTSTRTWALPTYNNHLYKQISNGTSGGSTNDNTYFGYSTPWGYFDFNRFHCHFSPRDWQ |
| | RLINNNWGFRPKRLXFKLFNIQVKEVTQNEGTKTIANNLTSTIQVFTDSEYQLPYVLGSA |
| | HQGCLPPFPADVFMIPQYGYLTLNNGSQAVGRSSFYCLEYFPSQMLRTGNNFXFSYTFED |
| | VPFHSSYAHSQSLDRLMNPLIDQYLYYLSRTQTTGGTAGTQTLQFSQAGPSXMANQAKNW |
| | LPGPCYRQQRVSTTTSQNNNSNFAWTGATKYHLNGRDSLVNPGVAMATHKDDEXRFFPSS |
| | GXLIFGKQGAGKDNVDYSNVMLTSEEEIKTTNPVATEEYGVVADNLQQQNTAPQXGTVNS |
| | QGALPGMVWQNRDVYLQGPIWAKIPHTDGNFHPSPLMGGFGLKHPPPQILIKNTPVPADP |
| | PTTFNQAKLNSFITQYSTGQVSVEIEWELQKENSKRWNPEIQYTSNYYKSTNVDFAVNTE |
| | GVYSEPRPIGTRYLTRNL |
| | (158) . . . (158) Thr or Ser |
| | (169) . . . (169) Arg or Lys |
| | (315) . . . (315) Asn or Ser |
| | (413) . . . (413) Gln or Glu |
| | (472) . . . (472) Asn, Thr or Ser |
| | (534) . . . (534) Asp or Glu |
| | (542) . . . (542) Ile or Val |
| | (595) . . . (595) Ile or Val |
| SEQ ID | MAADGYLPDWLEDNLSEGIREWWDLKPGAPKPKANQQKQDDGRGLVLPGYKYLGPFNGLD |
| NO: 136 | KGEPVNAADAAALEHDKAYDQQLKAGDNPYLRYNHADAEFQERLQEDTSFGGNLGRAVFQ |
| (Anc84 | AKKRVLEPLGLVEEGAKTAPGKKRPVEPSPQRSPDSSTGIGKKGQQPAXKRLNFGQTGDS |
| (AKU895 | ESVPDPQPIGEPPAAPSGVGSGTMAAGGGAPMADNNEGADGVGSSSGNWHCDSTWLGDRV |
| 99)) | ITTSTRTWALPTYNNHLYKQISNGTSGGSTNDNTYFGYSTPWGYFDFNRFHCHFSPRDWQ |
| | RLINNNWGFRPKRLXFKLFNIQVKEVTQNEGTKTIANNLTSTIQVFTDSEYQLPYVLGSA |
| | HQGCLPPFPADVFMIPQYGYLTLNNGSQAVGRSSFYCLEYFPSQMLRTGNNFEFSYTFED |
| | VPFHSSYAHSQSLDRLMNPLIDQYLYYLSRTQSTGGTAGTQQLLFSQAGPSNMSAQAKNW |
| | LPGPCYRQQRVSTTLSQNNNSNFAWTGATKYHLNGRDSLVNPGVAMATHKDDEXRFFPSS |
| | GXLMFGKQGAGKDNVDYSNVMLTSEEEIKTTNPVATEQYGVVADNLQQQNTAPIVGAVNS |
| | QGALPGMVWQNRDVYLQGPIWAKIPHTDGNFHPSPLMGGFGLKHPPPQILIKNTPVPADP |
| | PTTFNQAKLNSFITQYSTGQVSVEIEWELQKENSKRWNPEIQYTSNYYKSTNVDFAVNTE |
| | GVYSEPRPIGTRYLTRNL |
| | (169) . . . (169) Arg or Lys |
| | (315) . . . (315) Asn or Ser |
| | (534) . . . (534) Asp or Glu |
| | (542) . . . (542) Ile or Val |
| SEQ ID | MAADGYLPDWLEDNLSEGIREWWDLKPGAPKPKANQQKQDDGRGLVLPGYKYLGPFNGLD |
| NO: 137 | KGEPVNAADAAALEHDKAYDQQLKAGDNPYLRYNHADAEFQERLQEDTSFGGNLGRAVFQ |
| (Anc94) | AKKRVLEPLGLVEEGAKTAPGKKRPVEPSPQRSPDSSTGIGKKGQQPAKKRLNFGQTGDS |
| | ESVPDPQPIGEPPAGPSGLGSGTMAAGGGAPMADNNEGADGVGSSSGNWHCDSTWLGDRV |
| | ITTSTRTWALPTYNNHLYKQISNGTSGGSTNDNTYFGYSTPWGYFDFNRFHCHFSPRDWQ |
| | RLINNNWGFRPKRLNFKLFNIQVKEVTQNEGTKTIANNLTSTIQVFTDSEYQLPYVLGSA |
| | HQGCLPPFPADVFMIPQYGYLTLNNGSQAVGRSSFYCLEYFPSQMLRTGNNFEFSYTFED |
| | VPFHSSYAHSQSLDRLMNPLIDQYLYYLSRTQSTGGTAGTQQLLFSQAGPXNMSAQAKNW |
| | LPGPCYRQQRVSTTLSQNNNSNFAWTGATKYHLNGRDSLVNPGVAMATHKDDEERFFPSS |
| | GVLMFGKQGAGKDNVDYSSVMLTSEEEIKTTNPVATEQYGVVADNLQQQNTAPIVGAVNS |
| | QGALPGMVWQNRDVYLQGPIWAKIPHTDGNFHPSPLMGGFGLKHPPPQILIKNTPVPADP |
| | PTTFSQAKLASFITQYSTGQVSVEIEWELQKENSKRWNPEIQYTSNYYKSTNVDFAVNTE |
| | GTYSEPRPIGTRYLTRNL |
| | (471) . . . (471) Ser or Asn |
| SEQ ID | MAADGYLPDWLEDNLSEGIREWWDLKPGAPKPKANQQKQDDGRGLVLPGYKYLGPFNGLD |
| NO: 138 | KGEPVNAADAAALEHDKAYDQQLKAGDNPYLRYNHADAEFQERLQEDTSFGGNLGRAVFQ |
| (Anc110 | AKKRVLEPLGLVEEGAKTAPGKKRPVEQSPQEPDSSXLGIGKTGQQPAXKRLNFGQTGDS |
| (AKU896 | ESVPDPQPLGEPPAAPSGVGSNTMASGGGAPMADNNEGADGVGNSSGNWHCDSTWLGDRV |
| 00)) | ITTSTRTWALPTYNNHLYKQISNGTSGGSTNDNTYFGYSTPWGYFDFNRFHCHFSPRDWQ |
| | RLINNNWGFRPKRLNFKLFNIQVKEVTTNEGTKTIANNLTSTVQVFTDSEYQLPYVLGSA |
| | HQGCLPPFPADVFMIPQYGYLTLNNGSQAVGRSSFYCLEYFPSQMLRTGNNFQFSYTFED |
| | VPFHSSYAHSQSLDRLMNPLIDQYLYYLSRTQTTGTXGTQTLXFSQAGPSSMANQARNWV |
| | PGPCYRQQRVSTTTNQNNNSNFAWTGAXKXXLNGRDSLMNPGVAMASHKDDEDRFFPSSG |
| | VLIFGKQGAGNDNVDYSXVMITNEEEIKTTNPVATEEYGAVATNXQXLANTQAQTGLVHN |
| | QGVLPGMVWQNRDVYLQGPIWAKIPHTDGNFHPSPLMGGFGLKHPPPQILIKNTPVPADP |
| | PTTFNQAKLNSFITQYSTGQVSVEIEWELQKENSKRWNPEIQYTSNYYKSTNVDFAVNTE |
| | GVYSEPRPIGTRYLTRNL |
| | (157) . . . (157) Ser or Thr |
| | (169) . . . (169) Lys or Arg |
| | (457) . . . (457) Ala or Gly |
| | (463) . . . (463) Gln or Ala |
| | (508) . . . (508) Thr or Ala |
| | (510) . . . (510) Tyr or Phe |
| | (511) . . . (511) His or Lys |
| | (558) . . . (558) Gln or Asn |
| | (585) . . . (585) Asn or His |
| | (587) . . . (587) Ser or Ala |
| SEQ ID | MAADGYLPDWLEDNLSEGIREWWDLKPGAPKPKANQQKQDDGRGLVLPGYKYLGPFNGLD |
| NO: 139 | KGEPVNAADAAALEHDKAYDQQLKAGDNPYLRYNHADAEFQERLQEDTSFGGNLGRAVFQ |
| (Anc113 | AKKRVLEPLGLVEEGAKTAPGKKRPVEXSPQRSPDSSTGIGKKGQQPAXKRLNFGQTGDS |
| (AKU896 | ESVPDPQPLGEPPAAPSGVGSGTMAAGGGAPMADNNEGADGVGNASGNWHCDSTWLGDR |
| 01)) | V ITTSTRTWALPTYNNHLYKQISSQSAGSTNDNTYFGYSTPWGYFDFNRFHCHFSPRDWQR |
| | LINNNWGFRPKKLXFKLFNIQVKEVTTNDGVTTIANNLTSTVQVFSDSEYQLPYVLGSAH |
| | QGCLPPFPADVFMIPQYGYLTLNNGSQSVGRSSFYCLEYFPSQMLRTGNNFEFSYTFEDV |
| | PFHSSYAHSQSLDRLMNPLIDQYLYYLARTQSTTGGTAGNRELQFXQAGPSTMAEQAKNW |
| | LPGPCYRQQRVSKTLDQNNNSNFAWTGATKYHLNGRNSLVNPGVAMATHKDDEDRFFPSS |
| | GVLIFGKTGAANKTTLENVLMTXEEEIKTTNPVATEEYGXVSSNLQSXNTAPQTQTVNSQ |
| | GALPGMVWQNRDVYLQGPIWAKIPHTDGNFHPSPLMGGFGLKHPPPQILIKNTPVPANPP |
| | EVFTPAKFASFITQYSTGQVSVEIEWELQKENSKRWNPEIQYTSNYDKSTNVDFAVDSEG |
| | VYSEPRPIGTRYLTRNL |
| | (148) . . . (148) Pro or Gln |
| | (169) . . . (169) Lys or Arg |
| | (314) . . . (314) Arg or Asn |
| | (466) . . . (466) Tyr or His |
| | (563) . . . (563) Asn or Ser |
| | (580) . . . (580) Val or Ile |
| | (588) . . . (588) Ala or Ser |
| SEQ ID | MAADGYLPDWLEDNLSEGIREWWDLKPGAPKPKANQQKQDDGRGLVLPGYKYLGPFNGLD |
| NO: 140 | KGEPVNAADAAALEHDKAYDQQLKAGDNPYLRYNHADAEFQERLQEDTSFGGNLGRAVFQ |
| (Anc126 | AKKRVLEPLGLVEEGAKTAPGKKRPVEQSPQEPDSSSGIGKXGQQPAXKRLNFGQTGDSE |
| (AKU896 | SVPDPQPLGEPPAAPSGVGSNTMASGGGAPMADNNEGADGVGNXSGNWHCDSTWLGDRVI |
| 02)) | TTSTRTWALPTYNNHLYKQISSQSGASNDNHYFGYSTPWGYFDFNRFHCHFSPRDWQRLI |
| | NNNWGFRPKXLNFKLFNIQVKEVTTNDGTTTIANNLTSTVQVFTDSEYQLPYVLGSAHQG |
| | CLPPFPADVFMIPQYGYLTLNNGSQAVGRSSFYCLEYFPSQMLRTGNNFXFSYTFEDVPF |
| | HSSYAHSQSLDRLMNPLIDQYLYYLXRTQTTSGTAQNRELXFSQAGPSSMXNQAKNWLPG |
| | PCYRQQRVSKTANDNNNSNFAWTGATKYHLNGRDSLVNPGPAMASHKDDEDKFFPMSGVL |
| | IFGKQGAGASNVDLDNVMITDEEEIKTTNPVATEQYGTVATNLQSSNTAPATGTVNSQGA |
| | LPGMVWQDRDVYLQGPIWAKIPHTDGHFHPSPLMGGFGLKHPPPQILIKNTPVPANPPTT |
| | FSPAKFASFITQYSTGQVSVEIEWELQKENSKRWNPEIQYTSNYNKSXNVDFTVDTNGVY |
| | SEPRPIGTRYLTRNL |
| | (162) . . . (162) Ser or Thr |
| | (168) . . . (168) Lys or Arg |
| | (224) . . . (224) Ala or Ser |
| | (310) . . . (310) Arg or Lys |
| | (410) . . . (410) Thr or Gln |
| | (446) . . . (446) Ser or Asn |
| | (461) . . . (461) Gln or Leu |
| | (471) . . . (471) Ala or Ser |
| | (708) . . . (708) Ala or Thr |
| SEQ ID | MAADGYLPDWLEDNLSEGIREWWDLKPGAPQPKANQQHQDDXRGLVLPGYKYLGPFNGLD |
| NO: 141 | KGEPVNEADAAALEHDKAYDQQLKAGDNPYLKYNHADAEFQERLQEDTSFGGNLGRAVFQ |
| Anc127 | AKKRVLEPLGLVEEAAKTAPGKKRPVEQSPQEPDSSSGIGKSGQQPAXKRLNFGQTGDSE |
| (AKU896 | SVPDPQPLGEPPAAPSGVGSNTMASGGGAPMADNNEGADGVGNSSGNWHCDSTWLGDRVI |
| 03) | TTSTRTWALPTYNNHLYKQISSQSGASNDNHYFGYSTPWGYFDFNRFHCHFSPRDWQRLI |
| | NNNWGFRPKXLNFKLFNIQVKEVTQNDGTTTIANNLTSTVQVFTDSEYQLPYVLGSAHQG |
| | CLPPFPADVFMIPQYGYLTLNNGSQAVGRSSFYCLEYFPSQMLRTGNNFXFSYTFEDVPF |
| | HSSYAHSQSLDRLMNPLIDQYLYYLXRTQTTSGTTQQSRLXFSQAGPSSMXQQAXNWLPG |
| | PCYRQQRVSKTANDNNNSNFAWTXATKYHLNGRDSLVNPGPAMASHKDDEEKFFPMHGXL |
| | IFGKQGTGASNVDLDNVMITDEEEIRTTNPVATEQYGTVATNLQSSNTAPATGTVNSQGA |
| | LPGMVWQDRDVYLQGPIWAKIPHTDGHFHPSPLMGGFGLKHPPPQILIKNTPVPANPPTT |
| | FSPAKFASFITQYSTGQVSVEIEWELQKENSKRWNPEIQYTSNYNKSVNVDFTVDTNGVY |
| | SEPRPIGTRYLTRNL |
| | (42) . . . (42) Gly or Ser |
| | (168) . . . (168) Arg or Lys |
| | (310) . . . (310) Lys or Arg |
| | (410) . . . (410) Thr or Gln |
| | (446) . . . (446) Ser or Arg |
| | (461) . . . (461) Gln or Leu |
| | (471) . . . (471) Ala or Ser |
| | (475) . . . (475) Lys or Arg |
| | (504) . . . (504) Gly or Ala |
| | (539) . . . (539) Val or Asn |
| SEQ ID | MAADGYLPDWLEDNLSEGIREWWDLKPGAPKPKANQQKQDDGRGLVLPGYKYLGPFNGLDK |
| NO: 142 | GEPVNAADAAALEHDKAYDQQLKAGDNPYLRYNHADAEFQERLQEDTSFGGNLGRAVFQAKK |
| (Anc80L6 | RVLEPLGLVEEGAKTAPGKKRPVEQSPQEPDSSSGIGKKGQQPARKRLNFGQTGDSESVPDPQPL |
| 5 | GEPPAAPSGVGSNTMAAGGGAPMADNNEGADGVGNASGNWHCDSTWLGDRVITTSTRTW |
| (AKU895 | ALPTYNNHLYKQISSQSGGSTNDNTYFGYSTPWGYFDFNRFHCHFSPRDWQRLINNNWGFRPK |
| 95)) | KLNFKLFNIQVKEVTTNDGTTTIANNLTSTVQVFTDSEYQLPYVLGSAHQGCLPPFPADVFMIPQY |
| | GYLTLNNGSQAVGRSSFYCLEYFPSQMLRTGNNFQFSYTFEDVPFHSSYAHSQSLDRLMNPLIDQ |
| | YLYYLSRTQTTSGTAGNRTLQFSQAGPSSMANQAKNWLPGPCYRQQRVSKTTNQNNNSNFAW |
| | TGATKYHLNGRDSLVNPGPAMATHKDDEDKFFPMSGVLIFGKQGAGNSNVDLDNVMITNEEEI |
| | KTTNPVATEEYGTVATNLQSANTAPATGTVNSQGALPGMVWQDRDVYLQGPIWAKIPHTDGH |
| | FHPSPLMGGFGLKHPPPQILIKNTPVPANPPTTFSPAKFASFITQYSTGQVSVEIEWELQKENSKR |
| | WNPEIQYTSNYNKSTNVDFAVDTNGVYSEPRPIGTRYLTRNL |
| SEQ ID | MAADGYLPDWLEDNLSEGIREWWDLKPGAPKPKANQQKQDDGRGLVLPGYKYLGPFNGLDK |
| NO: 143 | GEPVNAADAAALEHDKAYDQQLKAGDNPYLRYNHADAEFQERLQEDTSFGGNLGRAVFQAKK |
| (Anc80L1) | RVLEPLGLVEEGAKTAPGKKRPVEQSPQEPDSSSGIGKKGQQPAKKRLNFGQTGDSESVPDPQPL |
| | GEPPAAPSGVGSNTMAAGGGAPMADNNEGADGVGNASGNWHCDSTWLGDRVITTSTRTW |
| | ALPTYNNHLYKQISSQSGASTNDNTYFGYSTPWGYFDFNRFHCHFSPRDWQRLINNNWGFRPK |
| | RLNFKLFNIQVKEVTTNDGTTTIANNLTSTVQVFTDSEYQLPYVLGSAHQGCLPPFPADVFMIPQY |
| | GYLTLNNGSQAVGRSSFYCLEYFPSQMLRTGNNFEFSYTFEDVPFHSSYAHSQSLDRLMNPLIDQ |
| | YLYYLSRTQTTSGTAGNRTLQFSQAGPSSMANQAKNWLPGPCYRQQRVSKTANQNNNSNFA |
| | WTGATKYHLNGRDSLVNPGPAMATHKDDEDKFFPMSGVLIFGKQGAGNSNVDLDNVMITSEE |
| | EIKTTNPVATEQYGTVATNLQSSNTAPATGTVNSQGALPGMVWQNRDVYLQGPIWAKIPHTD |
| | GHFHPSPLMGGFGLKHPPPQILIKNTPVPANPPTTFSPAKFASFITQYSTGQVSVEIEWELQKENS |
| | KRWNPEIQYTSNYNKSTNVDFAVDTNGVYSEPRPIGTRYLTRNL |
| SEQ ID | MAADGYLPDWLEDNLSEGIREWWDLKPGAPKPKANQQKQDDGRGLVLPGYKYLGPFNGLDK |
| NO: 144 | GEPVNAADAAALEHDKAYDQQLKAGDNPYLRYNHADAEFQERLQEDTSFGGNLGRAVFQAKK |
| (Anc80L2 | RVLEPLGLVEEGAKTAPGKKRPVEQSPQEPDSSSGIGKKGQQPARKRLNFGQTGDSESVPDPQPL |
| 7) | GEPPAAPSGVGSNTMAAGGGAPMADNNEGADGVGNASGNWHCDSTWLGDRVITTSTRTW |
| | ALPTYNNHLYKQISSQSGGSTNDNTYFGYSTPWGYFDFNRFHCHFSPRDWQRLINNNWGFRPK |
| | RLNFKLFNIQVKEVTTNDGTTTIANNLTSTVQVFTDSEYQLPYVLGSAHQGCLPPFPADVFMIPQY |
| | GYLTLNNGSQAVGRSSFYCLEYFPSQMLRTGNNFEFSYTFEDVPFHSSYAHSQSLDRLMNPLIDQ |
| | YLYYLSRTQTTSGTAGNRTLQFSQAGPSSMANQAKNWLPGPCYRQQRVSKTANQNNNSNFA |
| | WTGATKYHLNGRDSLVNPGPAMATHKDDEDKFFPMSGVLIFGKQGAGNSNVDLDNVMITNEE |
| | EIKTTNPVATEQYGTVATNLQSANTAPATGTVNSQGALPGMVWQDRDVYLQGPIWAKIPHTD |
| | GHFHPSPLMGGFGLKHPPPQILIKNTPVPANPPTTFSPAKFASFITQYSTGQVSVEIEWELQKENS |
| | KRWNPEIQYTSNYNKSTNVDFAVDTNGVYSEPRPIGTRYLTRNL |
| SEQ ID | MAADGYLPDWLEDNLSEGIREWWDLKPGAPKPKANQQKQDDGRGLVLPGYKYLGPFNGLDK |
| NO: 145 | GEPVNAADAAALEHDKAYDQQLKAGDNPYLRYNHADAEFQERLQEDTSFGGNLGRAVFQAKK |
| (Anc80L3 | RVLEPLGLVEEGAKTAPGKKRPVEQSPQEPDSSSGIGKKGQQPAKKRLNFGQTGDSESVPDPQPL |
| 3) | GEPPAAPSGVGSNTMAAGGGAPMADNNEGADGVGNASGNWHCDSTWLGDRVITTSTRTW |
| | ALPTYNNHLYKQISSQSGGSTNDNTYFGYSTPWGYFDFNRFHCHFSPRDWQRLINNNWGFRPK |
| | KLNFKLFNIQVKEVTTNDGTTTIANNLTSTVQVFTDSEYQLPYVLGSAHQGCLPPFPADVFMIPQY |
| | GYLTLNNGSQAVGRSSFYCLEYFPSQMLRTGNNFEFSYTFEDVPFHSSYAHSQSLDRLMNPLIDQ |
| | YLYYLSRTQTTSGTAGNRTLQFSQAGPSSMANQAKNWLPGPCYRQQRVSKTANQNNNSNFA |
| | WTGATKYHLNGRDSLVNPGPAMATHKDDEDKFFPMSGVLIFGKQGAGNSNVDLDNVMITSEE |
| | EIKTTNPVATEQYGTVATNLQSSNTAPATGTVNSQGALPGMVWQNRDVYLQGPIWAKIPHTD |
| | GHFHPSPLMGGFGLKHPPPQILIKNTPVPANPPTTFSPAKFASFITQYSTGQVSVEIEWELQKENS |
| | KRWNPEIQYTSNYNKSTNVDFAVDTNGVYSEPRPIGTRYLTRNL |
| SEQ ID | MAADGYLPDWLEDNLSEGIREWWDLKPGAPKPKANQQKQDDGRGLVLPGYKYLGPFNGLDK |
| NO: 146 | GEPVNAADAAALEHDKAYDQQLKAGDNPYLRYNHADAEFQERLQEDTSFGGNLGRAVFQAKK |
| (Anc80L3 | RVLEPLGLVEEGAKTAPGKKRPVEQSPQEPDSSSGIGKKGQQPAKKRLNFGQTGDSESVPDPQPL |
| 6) | GEPPAAPSGVGSNTMASGGGAPMADNNEGADGVGNASGNWHCDSTWLGDRVITTSTRTWA |
| | LPTYNNHLYKQISSQSGGSTNDNTYFGYSTPWGYFDFNRFHCHFSPRDWQRLINNNWGFRPKK |
| | LNFKLFNIQVKEVTTNDGTTTIANNLTSTVQVFTDSEYQLPYVLGSAHQGCLPPFPADVFMIPQY |
| | GYLTLNNGSQAVGRSSFYCLEYFPSQMLRTGNNFEFSYTFEDVPFHSSYAHSQSLDRLMNPLIDQ |
| | YLYYLSRTQTTSGTAGNRTLQFSQAGPSSMANQAKNWLPGPCYRQQRVSKTANQNNNSNFA |
| | WTGATKYHLNGRDSLVNPGPAMATHKDDEDKFFPMSGVLIFGKQGAGNSNVDLDNVMITSEE |
| | EIKTTNPVATEEYGTVATNLQSSNTAPATGTVNSQGALPGMVWQNRDVYLQGPIWAKIPHTDG |
| | HFHPSPLMGGFGLKHPPPQILIKNTPVPANPPTTFSPAKFASFITQYSTGQVSVEIEWELQKENSK |
| | RWNPEIQYTSNYNKSTNVDFAVDTNGVYSEPRPIGTRYLTRNL |
| SEQ ID | MAADGYLPDWLEDNLSEGIREWWDLKPGAPKPKANQQKQDDGRGLVLPGYKYLGPFNGLDK |
| NO: 147 | GEPVNAADAAALEHDKAYDQQLKAGDNPYLRYNHADAEFQERLQEDTSFGGNLGRAVFQAKK |
| (Anc80L4 | RVLEPLGLVEEGAKTAPGKKRPVEQSPQEPDSSSGIGKKGQQPAKKRLNFGQTGDSESVPDPQPL |
| 4) | GEPPAAPSGVGSNTMASGGGAPMADNNEGADGVGNASGNWHCDSTWLGDRVITTSTRTWA |
| | LPTYNNHLYKQISSQSGGSTNDNTYFGYSTPWGYFDFNRFHCHFSPRDWQRLINNNWGFRPKK |
| | LNFKLFNIQVKEVTTNDGTTTIANNLTSTVQVFTDSEYQLPYVLGSAHQGCLPPFPADVFMIPQY |
| | GYLTLNNGSQAVGRSSFYCLEYFPSQMLRTGNNFQFSYTFEDVPFHSSYAHSQSLDRLMNPLIDQ |
| | YLYYLSRTQTTSGTAGNRELQFSQAGPSSMANQAKNWLPGPCYRQQRVSKTTNQNNNSNFAW |
| | TGATKYHLNGRDSLVNPGPAMATHKDDEDKFFPMSGVLIFGKQGAGNSNVDLDNVMITNEEEI |
| | KTTNPVATEQYGTVATNLQSANTAPATGTVNSQGALPGMVWQDRDVYLQGPIWAKIPHTDG |
| | HFHPSPLMGGFGLKHPPPQILIKNTPVPANPPTTFSPAKFASFITQYSTGQVSVEIEWELQKENSK |
| | RWNPEIQYTSNYNKSTNVDFAVDTNGVYSEPRPIGTRYLTRNL |
| SEQ ID | MAADGYLPDWLEDNLSEGIREWWDLKPGAPKPKANQQKQDDGRGLVLPGYKYLGPFNGLDK |
| NO: 148 | GEPVNAADAAALEHDKAYDQQLKAGDNPYLRYNHADAEFQERLQEDTSFGGNLGRAVFQAKK |
| (Anc80L5 | RVLEPLGLVEEGAKTAPGKKRPVEQSPQEPDSSSGIGKKGQQPAKKRLNFGQTGDSESVPDPQPL |
| 9) | GEPPAAPSGVGSNTMASGGGAPMADNNEGADGVGNASGNWHCDSTWLGDRVITTSTRTWA |
| | LPTYNNHLYKQISSQSGASTNDNTYFGYSTPWGYFDFNRFHCHFSPRDWQRLINNNWGFRPKR |
| | LNFKLFNIQVKEVTTNDGTTTIANNLTSTVQVFTDSEYQLPYVLGSAHQGCLPPFPADVFMIPQY |
| | GYLTLNNGSQAVGRSSFYCLEYFPSQMLRTGNNFQFSYTFEDVPFHSSYAHSQSLDRLMNPLIDQ |
| | YLYYLSRTQTTSGTAGNRELQFSQAGPSSMANQAKNWLPGPCYRQQRVSKTTNQNNNSNFAW |
| | TGATKYHLNGRDSLVNPGPAMATHKDDEDKFFPMSGVLIFGKQGAGNSNVDLDNVMITNEEEI |
| | KTTNPVATEEYGTVATNLQSANTAPATGTVNSQGALPGMVWQNRDVYLQGPIWAKIPHTDGH |
| | FHPSPLMGGFGLKHPPPQILIKNTPVPANPPTTFSPAKFASFITQYSTGQVSVEIEWELQKENSKR |
| | WNPEIQYTSNYNKSTNVDFAVDTNGVYSEPRPIGTRYLTRNL |
| SEQ ID | MAADGYLPDWLEDNLSEGIREWWDLKPGAPKPKANQQKQDDGRGLVLPGYKYLGPFNGLDK |
| NO: 149 | GEPVNAADAAALEHDKAYDQQLKAGDNPYLRYNHADAEFQERLQEDTSFGGNLGRAVFQAKK |
| (Anc80L6 | RVLEPLGLVEEGAKTAPGKKRPVEQSPQEPDSSSGIGKKGQQPARKRLNFGQTGDSESVPDPQPL |
| 0) | GEPPAAPSGVGSNTMAAGGGAPMADNNEGADGVGNASGNWHCDSTWLGDRVITTSTRTW |
| | ALPTYNNHLYKQISSQSGGSTNDNTYFGYSTPWGYFDFNRFHCHFSPRDWQRLINNNWGFRPK |
| | RLNFKLFNIQVKEVTTNDGTTTIANNLTSTVQVFTDSEYQLPYVLGSAHQGCLPPFPADVFMIPQY |
| | GYLTLNNGSQAVGRSSFYCLEYFPSQMLRTGNNFEFSYTFEDVPFHSSYAHSQSLDRLMNPLIDQ |
| | YLYYLSRTQTTSGTAGNRELQFSQAGPSSMANQAKNWLPGPCYRQQRVSKTTNQNNNSNFAW |
| | TGATKYHLNGRDSLVNPGPAMATHKDDEDKFFPMSGVLIFGKQGAGNSNVDLDNVMITSEEEI |
| | KTTNPVATEEYGTVATNLQSSNTAPATGTVNSQGALPGMVWQERDVYLQGPIWAKIPHTDGH |
| | FHPSPLMGGFGLKHPPPQILIKNTPVPANPPTTFSPAKFASFITQYSTGQVSVEIEWELQKENSKR |
| | WNPEIQYTSNYNKSTNVDFAVDTNGVYSEPRPIGTRYLTRNL |
| SEQ ID | MAADGYLPDWLEDNLSEGIREWWDLKPGAPKPKANQQKQDDGRGLVLPGYKYLGPFNGLDK |
| NO: 150 | GEPVNAADAAALEHDKAYDQQLKAGDNPYLRYNHADAEFQERLQEDTSFGGNLGRAVFQAKK |
| (Anc80L6 | RVLEPLGLVEEGAKTAPGKKRPVEQSPQEPDSSSGIGKKGQQPARKRLNFGQTGDSESVPDPQPL |
| 2) | GEPPAAPSGVGSNTMASGGGAPMADNNEGADGVGNASGNWHCDSTWLGDRVITTSTRTWA |
| | LPTYNNHLYKQISSQSGGSTNDNTYFGYSTPWGYFDFNRFHCHFSPRDWQRLINNNWGFRPKK |
| | LNFKLFNIQVKEVTTNDGTTTIANNLTSTVQVFTDSEYQLPYVLGSAHQGCLPPFPADVFMIPQY |
| | GYLTLNNGSQAVGRSSFYCLEYFPSQMLRTGNNFEFSYTFEDVPFHSSYAHSQSLDRLMNPLIDQ |
| | YLYYLSRTQTTSGTAGNRELQFSQAGPSSMANQAKNWLPGPCYRQQRVSKTTNQNNNSNFAW |
| | TGATKYHLNGRDSLVNPGPAMATHKDDEDKFFPMSGVLIFGKQGAGNSNVDLDNVMITSEEEI |
| | KTTNPVATEEYGTVATNLQSANTAPATGTVNSQGALPGMVWQDRDVYLQGPIWAKIPHTDGH |
| | FHPSPLMGGFGLKHPPPQILIKNTPVPANPPTTFSPAKFASFITQYSTGQVSVEIEWELQKENSKR |
| | WNPEIQYTSNYNKSTNVDFAVDTNGVYSEPRPIGTRYLTRNL |
| SEQ ID | MAADGYLPDWLEDNLSEGIREWWDLKPGAPKPKANQQKQDDGRGLVLPGYKYLGPFNGLDK |
| NO: 151 | GEPVNAADAAALEHDKAYDQQLKAGDNPYLRYNHADAEFQERLQEDTSFGGNLGRAVFQAKK |
| (Anc82DI) | RVLEPLGLVEEGAKTAPGKKRPVEQSPQREPDSSTGIGKSGQQPAKKRLNFGQTGDSESVPDPQ |
| | PLGEPPAAPSGVGSNTMASGGGAPMADNNEGADGVGNSSGNWHCDSTWLGDRVITTSTRT |
| | WALPTYNNHLYKQISNGTSGGSTNDNTYFGYSTPWGYFDFNRFHCHFSPRDWQRLINNNWGF |
| | RPKRLNFKLFNIQVKEVTTNEGTKTIANNLTSTVQVFTDSEYQLPYVLGSAHQGCLPPFPADVFMI |
| | PQYGYLTLNNGSQAVGRSSFYCLEYFPSQMLRTGNNFQFSYTFEDVPFHSSYAHSQSLDRLMNP |
| | LIDQYLYYLSRTQTTGGTAGTQTLQFSQAGPSSMANQARNWVPGPCYRQQRVSTTTNQNNNS |
| | NFAWTGATKYHLNGRDSLMNPGVAMASHKDDEDRFFPSSGVLIFGKQGAGNDNVDYSNVMI |
| | TSEEEIKTTNPVATEEYGVVATNHQSANTQAQTGTVQNQGILPGMVWQNRDVYLQGPIWAKIP |
| | HTDGNFHPSPLMGGFGLKHPPPQILIKNTPVPADPPTTFNQAKLNSFITQYSTGQVSVEIEWELQ |
| | KENSKRWNPEIQYTSNYYKSTNVDFAVNTEGVYSEPRPIGTRYLTRNL |
| SEQ ID | MAADGYLPDWLEDNLSEGIREWWDLKPGAPKPKANQQKQDNGRGLVLPGYKYLGPFNGLDK |
| NO: 152 | GEPVNAADAAALEHDKAYDQQLQAGDNPYLRYNHADAEFQERLQEDTSFGGNLGRAVFQAKK |
| (AAV rh. | RVLEPLGLVESPVKTAPGKKRPVEPSPQRSPDSSTGIGKKGQQPAKKRLNFGQTGDSESVPDPQP |
| 74) | IGEPPAGPSGLGSGTMAAGGGAPMADNNEGADGVGSSSGNWHCDSTWLGDRVITTSTRTWA |
| | LPTYNNHLYKQISNGTSGGSTNDNTYFGYSTPWGYFDFNRFHCHFSPRDWQRLINNNWGFRPK |
| | RLNFKLFNIQVKEVTQNEGTKTIANNLTSTIQVFTDSEYQLPYVLGSAHQGCLPPFPADVFMIPQY |
| | GYLTLNNGSQAVGRSSFYCLEYFPSQMLRTGNNFEFSYNFEDVPFHSSYAHSQSLDRLMNPLIDQ |
| | YLYYLSRTQSTGGTAGTQQLLFSQAGPNNMSAQAKNWLPGPCYRQQRVSTTLSQNNNSNFAW |
| | TGATKYHLNGRDSLVNPGVAMATHKDDEERFFPSSGVLMFGKQGAGKDNVDYSSVMLTSEEEI |
| | KTTNPVATEQYGVVADNLQQQNAAPIVGAVNSQGALPGMVWQNRDVYLQGPIWAKIPHTDG |
| | NFHPSPLMGGFGLKHPPPQILIKNTPVPADPPTTFNQAKLASFITQYSTGQVSVEIEWELQKENSK |
| | RWNPEIQYTSNYYKSTNVDFAVNTEGTYSEPRPIGTRYLTRNL |

What is claimed is:

1. In a method of treating a patient by non-systemic administration of a recombinant adeno-associated virus (rAAV) to a target site, the improvement comprising:
adjunctively administering to the patient via systemic administration a composition comprising at least one antibody that is capable of neutralizing the non-systemically administered rAAV.

2. The method of claim 1, wherein the at least one antibody binds to at least one capsid protein of the rAAV.

3. The method of any one of claims 1-2, wherein the rAAV has a capsid protein of an AAV selected from: AAV2; AAV1; AAV6; AAV3; AAV LK03; AAV7; AAV8; AAV hu.37; AAV rh.10; AAV9; AAV hu.68; AAV10; AAV5; AAV3-3; AAV4-4; AAV1-A; hu.46-A; hu.48-A; hu.44-A; hu.43-A; AAV6-A; hu.34-B; hu.47-B; hu.29-B; rh.63-B; hu.56-B; hu.45-B; rh.57-B; rh.35-B; rh.58-B; rh.28-B; rh.51-B; rh.19-B; rh.49-B; rh.52-B; rh.13-B; AAV2-B; rh.20-B; rh.24-B; rh.64-B; hu.27-B; hu.21-B; hu.22-B; hu.23-B; hu.7-C; hu.61-C; rh.56-C; hu. 9-C; hu.54-C; hu.53-C; hu.60-C; hu.55-C; hu.2-C; hu.1-C; hu.18-C; hu.3-C; hu.25-C; hu.15-C; hu.16-C; hu.11-C; hu.10-C; hu.4-C; rh.54-D; rh.48-D; rh.55-D; rh.62-D; AAV7-D; rh.52-E; rh.51-E; hu.39-E; rh.53-E; hu.37-E; rh.43-E; rh.50-E; rh.49-E; rh.61-E; hu.41-E; rh.64-E; hu.42-E; rh.57-E; rh.40-E; hu.67-E; hu.17-E; hu.6-E; hu.66-E; rh.38-E; hu.32-F; AAV9/hu; hu.31-F; Anc80; Anc81; Anc82; Anc83; Anc84; Anc94; Anc113; Anc126; Anc127; Anc80L27; Anc80L59; Anc80L60; Anc80L62; Anc80L65; Anc80L33; Anc80L36; Anc80L44; Anc80L1; Anc110; and Anc80DI.

4. The method of claim 3, wherein the at least one antibody is an IgG antibody.

5. The method of any one of claims 1-4, wherein the composition is capable of neutralizing an rAAV selected from AAV2; AAV1; AAV6; AAV3; AAV LK03; AAV7; AAV8; AAV hu.37; AAV rh.10; AAV9; AAV hu.68; AAV10; AAV5; AAV3-3; AAV4-4; AAV1-A; hu.46-A; hu.48-A; hu.44-A; hu.43-A; AAV6-A; hu.34-B; hu.47-B; hu.29-B; rh.63-B; hu.56-B; hu.45-B; rh.57-B; rh.35-B; rh.58-B; rh.28-B; rh.51-B; rh.19-B; rh.49-B; rh.52-B; rh.13-B; AAV2-B; rh.20-B; rh.24-B; rh.64-B; hu.27-B; hu.21-B; hu.22-B; hu.23-B; hu.7-C; hu.61-C; rh.56-C; hu. 9-C; hu.54-C; hu.53-C; hu.60-C; hu.55-C; hu.2-C; hu.1-C; hu.18-C; hu.3-C; hu.25-C; hu.15-C; hu.16-C; hu.11-C; hu.10-C; hu.4-C; rh.54-D; rh.48-D; rh.55-D; rh.62-D; AAV7-D; rh.52-E; rh.51-E; hu.39-E; rh.53-E; hu.37-E; rh.43-E; rh.50-E; rh.49-E; rh.61-E; hu.41-E; rh.64-E; hu.42-E; rh.57-E; rh.40-E; hu.67-E; hu.17-E; hu.6-E; hu.66-E; rh.38-E; hu.32-F; AAV9/hu; hu.31-F; Anc80; Anc81; Anc82; Anc83; Anc84; Anc94; Anc113; Anc126; Anc127; Anc80L27; Anc80L59; Anc80L60; Anc80L62; Anc80L65; Anc80L33; Anc80L36; Anc80L44; Anc80L1; Anc110; and Anc80DI.

6. The method of any one of claims 1-5, wherein the composition comprises a monoclonal antibody.

7. The method of any one of claims 1-6, wherein the composition comprises polyclonal antibodies comprising a mixture of monoclonal antibodies.

8. The method of any one of claims 1-5, wherein the composition comprises polyclonal antibodies obtained from at least 100 donors.

9. The method of claim 6, wherein the composition comprises polyclonal antibodies obtained from at least 500, at least 1000, at least 5000, or at least 10,000 donors.

10. The method of any one of claims 1-9, wherein the composition is intravenous immunoglobulin (IVIG).

11. The method of claim 10, wherein the IVIG is a pool of antibodies obtained from: Gammagard™ Liquid® (Baxter HealthCare Corp), Gammagard™ S/D, Gammaplex™, Bivigam™, Carimune™ NF, Gamunex-C, Gammaked™, Flebogamma™ DIF, Octagam™, and Privigen™.

12. The method of any one of claims 1-11, wherein the composition comprises recombinant polyclonal antibodies.

13. The method of any one of claims 1-11, wherein the composition comprises recombinant IVIG (rIVIG).

14. The method of any one of claim 1-3 or 5, wherein the at least one antibody is an antigen-binding fragment selected from: a single chain Fv (scFv), a Fab, a (Fab′)₂, and an (ScFv)₂.

15. The method of any one of claim 1-3 or 5, wherein the composition comprises: a bispecific antibody, a single-domain antibody (dAb), a diabody (db), a nanobody, and a unibody.

16. The method of any one of claims 1-9, wherein the composition is administered by intravenous injection or infusion.

17. The method of any one of claims 1-16, wherein the composition is IVIG and the IVIG is administered at a dose ranging from 1-2000 mg/kg patient weight.

18. The method of claim 17, wherein the IVIG is administered at a dose ranging from 1-2 mg/kg patient weight.

19. The method of claim 17, wherein the IVIG is administered at a dose ranging from 1-10 mg/ml.

20. The method of claim 17, wherein the IVIG is administered at a dose ranging from 1-4 mg/ml.

21. The method of claim 17, wherein IVIG is administered as a single-dose.

22. The method of any one of claims 17-21, wherein the IVIG is administered daily.

23. The method of any one of claims 17-22, wherein the IVIG is administered 2 times a day, three times a day, or four times a day.

24. The method of any one of claims 17-23, wherein the IVIG is administered 2 times a day, three times a day, or four times a day.

25. The method of any one of claims 19-24, wherein the IVIG is administered for no more than one week.

26. The method of any one of claims 17-25, wherein the IVIG is administered for at least 5 minutes, at least 10 minutes, at least 15 minutes, at least 20 minutes, at least 25 minutes, or at least 30 minutes.

27. The method of any one of claims 1-26, wherein the composition is administered before administration of the rAAV to the patient.

28. The method of claim 27, wherein the composition is administered at least 30 minutes before, at least 1 hour before, at least 2 hours before, at least 4 hours before at least 6 hours before, or at least 24 hours before, administration of the rAAV to the patient.

29. The method of claim 27, wherein the composition is administered no more than one week before administration of the rAAV to the patient.

30. The method of any one of claims 1-30, wherein the composition is administered after administration of the rAAV to the patient.

31. The method of claim 30, wherein the composition is administered no more than 30 minutes after, at least 1 hour after, at least 2 hours after, at least 4 hours after, at least 6 hours after, at least 24 hours after, or no more than one week after administration of the rAAV to the patient.

32. The method of any one of claims 1-3128, wherein the composition is administered on the same day as administration of the rAAV to the patient.

33. The method of any one of claims 1-32, wherein the composition is administered at a sufficient amount to alter biodistribution of the rAAV following administration to the patient.

34. The method of claim 33, wherein altering rAAV biodistribution reduces infection of liver cells.

35. The method of claim 33, wherein altering rAAV biodistribution reduces infection of cells outside of the target site.

36. The method of any one of claims 1-35, wherein the composition is administered at a sufficient amount to reduce liver toxicity of the rAAV following administration to the patient.

37. The method of any one of claims 1-35, wherein the composition is administered at a sufficient amount to reduce toxicity of the rAAV outside of the target site following administration to the patient.

38. The method of any one of claims 1-37, wherein the composition is administered at a sufficient amount to neutralize rAAV released from the target site.

39. The method of any one of claim 1-38, wherein the target site is selected from: brain, spinal cord, muscle, eye, and ear of the patient.

40. The method of any one of claims 1-39, wherein the target site is not within the central nervous system of the patient.

41. A method of treating a patient comprising the steps of:
non-systemically administering to a target site of the patient a first pharmaceutical composition comprising a recombinant adeno associated virus (rAAV); and
adjunctively administering to the patient via systemic administration a second pharmaceutical composition comprising at least one antibody that is capable of neutralizing the non-systemically administered rAAV.

42. The method of claim 41, wherein the at least one antibody binds to a capsid protein of the rAAV.

43. The method of any one of claims 41-42, wherein the rAAV has a capsid protein of an AAV selected from: AAV2; AAV1; AAV6; AAV3; AAV LK03; AAV7; AAV8; AAV hu.37; AAV rh. 10; AAV9; AAV hu. 68; AAV10; AAV5; AAV3-3; AAV4-4; AAV1-A; hu.46-A; hu.48-A; hu.44-A; hu.43-A; AAV6-A; hu.34-B; hu.47-B; hu.29-B; rh.63-B; hu.56-B; hu.45-B; rh.57-B; rh.35-B; rh.58-B; rh.28-B; rh.51-B; rh.19-B; rh.49-B; rh.52-B; rh.13-B; AAV2-B; rh.20-B; rh.24-B; rh.64-B; hu.27-B; hu.21-B; hu.22-B; hu.23-B; hu.7-C; hu.61-C; rh.56-C; hu. 9-C; hu.54-C; hu.53-C; hu.60-C; hu.55-C; hu.2-C; hu.1-C; hu.18-C; hu.3-C; hu.25-C; hu.15-C; hu.16-C; hu.11-C; hu.10-C; hu.4-C; rh.54-D; rh.48-D; rh.55-D; rh.62-D; AAV7-D; rh.52-E; rh.51-E; hu.39-E; rh.53-E; hu.37-E; rh.43-E; rh.50-E; rh.49-E; rh.61-E; hu.41-E; rh.64-E; hu.42-E; rh.57-E; rh.40-E; hu.67-E; hu.17-E; hu.6-E; hu.66-E; rh.38-E; hu.32-F; AAV9/hu; hu.31-F; Anc80; Anc81; Anc82; Anc83; Anc84; Anc94; Anc113; Anc126; Anc127; Anc80L27; Anc80L59; Anc80L60; Anc80L62; Anc80L65; Anc80L33; Anc80L36; Anc80L44; Anc80L1; Anc110; Anc80DI; and a variant thereof.

44. The method of claim 43, wherein the AAV is AAV8 or AAV9.

45. The method of claim 43, wherein the AAV is rh.10.

46. The method of claim 43, wherein the AAV is hu.68.

47. The method of claim 43, wherein the AAV is Anc80L65.

48. The method of any one of claims 41-47, wherein the antibody is an IgG antibody.

49. The method of any one of claims 41-48, wherein the second pharmaceutical composition is capable of neutralizing an AAV selected from AAV2; AAV1; AAV6; AAV3; AAV LK03; AAV7; AAV8; AAV hu.37; AAV rh.10; AAV9; AAV hu.68; AAV10; AAV5; AAV3-3; AAV4-4; AAV1-A; hu.46-A; hu.48-A; hu.44-A; hu.43-A; AAV6-A; hu.34-B; hu.47-B; hu.29-B; rh.63-B; hu.56-B; hu.45-B; rh.57-B; rh.35-B; rh.58-B; rh.28-B; rh.51-B; rh.19-B; rh.49-B; rh.52-B; rh.13-B; AAV2-B; rh.20-B; rh.24-B; rh.64-B; hu.27-B; hu.21-B; hu.22-B; hu.23-B; hu.7-C; hu.61-C; rh.56-C; hu. 9-C; hu.54-C; hu.53-C; hu.60-C; hu.55-C; hu.2-C; hu.1-C; hu.18-C; hu.3-C; hu.25-C; hu.15-C; hu.16-C; hu.11-C; hu.10-C; hu.4-C; rh.54-D; rh.48-D; rh.55-D; rh.62-D; AAV7-D; rh.52-E; rh.51-E; hu.39-E; rh.53-E; hu.37-E; rh.43-E; rh.50-E; rh.49-E; rh.61-E; hu.41-E; rh.64-E; hu.42-E; rh.57-E; rh.40-E; hu.67-E; hu.17-E; hu.6-E; hu.66-E; rh.38-E; hu.32-F; AAV9/hu; hu.31-F; Anc80; Anc81; Anc82; Anc83; Anc84; Anc94; Anc113; Anc126; Anc127; Anc80L27; Anc80L59; Anc80L60; Anc80L62; Anc80L65; Anc80L33; Anc80L36; Anc80L44; Anc80L1; Anc110; and Anc80DI.

50. The method of any one of claims 40-49, wherein the at least one antibody is a monoclonal antibody.

51. The method of any one of claims 40-50, wherein the second pharmaceutical composition comprises polyclonal antibodies comprising a mixture of monoclonal antibodies.

52. The method of any one of claims 41-51, wherein the second pharmaceutical composition comprises polyclonal antibodies obtained from at least 100 donors.

53. The method of claim 52, wherein the second pharmaceutical composition comprises polyclonal antibodies obtained from at least 500, 1000, 5000, or 10,000 donors.

54. The method of any one of claims 41-53, wherein the second pharmaceutical composition comprises intravenous immunoglobulin (IVIG).

55. The method of claim 55, wherein the IVIG is a pool of antibodies obtained from: Gammagard™ Liquid® (Baxter HealthCare Corp), Gammagard™ S/D, Gammaplex™, Bivigam™, Carimune™ NF, Gamunex-C, Gammaked™, Flebogamma™ DIF, Octagam™, and Privigen™.

56. The method of any one of claims 41-55, wherein the second pharmaceutical composition comprises recombinant polyclonal antibodies.

57. The method of any one of claims 41-55, wherein the second pharmaceutical composition comprises recombinant IVIG (rIVIG).

58. The method of any one of claims 41-57, wherein the at least one antibody comprises an antigen-binding fragment selected from: a single chain Fv (scFv), a Fab, a (Fab′)₂, and an (ScFv)₂.

59. The method of any one of claims 41-58, wherein the at least one antibody comprises: a bispecific antibody, a single-domain antibody (dAb), a diabody (db), a nanobody, a unibody, and a diabody.

60. The method of any one of claims 41-59, wherein the first pharmaceutical composition is administered locally.

61. The method of claim 60, wherein the target site is within the central nervous system.

62. The method of claim 61, wherein the target site is selected from: brain, spinal cord, muscle, eye, and ear of the patient.

63. The method of any one of claim 61, wherein the first pharmaceutical composition is administered by: intrathecal injection or infusion, intraocular injection, intravitreal injection or infusion, inner ear injection or infusion, intracerebroventricular injection or infusion, intracisternal magna injection (ICM) or infusion, subretinal injection or infusion, or intramuscular injection or infusion.

64. The method of claim 63, wherein intrathecal injection or infusion is lumbar injection or infusion.

65. The method of claim 61, wherein the first pharmaceutical composition is administered to the brain or spinal cord by intracerebral, intrathecal, intracranial, intracerebroventricular, or cisterna magna administration.

66. The method of any one of claims 41-65, wherein the second pharmaceutical composition is administered systemically.

67. The method of claim 66, wherein the second pharmaceutical composition is administered by intravenous injection or infusion.

68. The method of any one of claims 41-67, wherein the second pharmaceutical composition comprises IVIG and the IVIG is administered at a dose ranging from 1-2000 mg/kg.

69. The method of claim 68, wherein the IVIG is administered at a dose ranging from 1-2 mg/kg.

70. The method of claim 68, wherein the IVIG is administered at a dose ranging from 1-10 mg/ml.

71. The method of claim 68, wherein the IVIG is administered at a dose ranging from 1-4 mg/ml.

72. The method of claim 68, wherein IVIG is administered as a single-dose.

73. The method of any one of claims 68-72, wherein the IVIG is administered daily.

74. The method of any one of claims 68-72, wherein the IVIG is administered at least 2 times a day.

75. The method of any one of claims 41-74, wherein the second pharmaceutical composition is administered before administration of the first pharmaceutical composition to the patient.

76. The method of claim 75, wherein the second pharmaceutical composition is administered at least 30 minutes before, at least 1 hour before, or at least 2 hours before administration of the first pharmaceutical composition to the patient.

77. The method of claim 75, wherein the second pharmaceutical composition is administered at least one day before, at least one week before, or at least two weeks before administration of the first pharmaceutical composition to the patient.

78. The method of any one of claims 41-74, wherein the second pharmaceutical composition is administered after administration of the first pharmaceutical composition to the patient.

79. The method of claim 78, wherein the second pharmaceutical composition is administered at least 30 minutes after, at least 1 hour after, or at least 2 hours after administration of the first pharmaceutical composition to the patient.

80. The method of claim 78, wherein the second pharmaceutical composition is administered at least one day after, at least two days after, or at least one week after administration of the first pharmaceutical composition to the patient.

81. The method of any one of claims 41-74, wherein the first pharmaceutical composition and the second pharmaceutical composition are administered on the same day.

82. The method of any one of claims 41-81, wherein the second pharmaceutical composition is administered at a sufficient amount to alter biodistribution of the rAAV following administration to the patient.

83. The method of claim 82, wherein altering AAV biodistribution reduces rAAV infection of liver cells.

84. The method of claim 82, wherein altering AAV biodistribution reduces rAAV infection of cells outside of the target site.

85. The method of any one of claims 41-84, wherein the second pharmaceutical composition is administered at a sufficient amount to reduce liver toxicity of the rAAV following administration to the patient.

86. The method of any one of claims 41-85, wherein the second pharmaceutical composition is administered at a sufficient amount to reduce toxicity of the rAAV outside of the target site following administration to the patient.

87. The method of any one of claim 83-85, wherein the target site is selected from: brain, spinal cord, muscle, eye, and ear of the patient.

88. The method of any one of claims 41-87, wherein the target site is not within the central nervous system.

89. A kit for a combination therapy comprising: a first pharmaceutical composition comprising a recombinant adeno associated virus (rAAV); and a second pharmaceutical composition comprising at least one antibody capable of neutralizing non-systemically administered rAAV of the first pharmaceutical composition.

90. The kit of claim 89, wherein the at least one antibody binds to a capsid protein of the rAAV.

91. The kit of any one of claims 89-90, wherein the capsid protein of an AAV is selected from AAV2; AAV1; AAV6; AAV3; AAV LK03; AAV7; AAV8; AAV hu.37; AAV rh.10; AAV9; AAV hu.68; AAV10; AAV5; AAV3-3; AAV4-4; AAV1-A; hu.46-A; hu.48-A; hu.44-A; hu.43-A; AAV6-A; hu.34-B; hu.47-B; hu.29-B; rh.63-B; hu.56-B; hu.45-B; rh.57-B; rh.35-B; rh.58-B; rh.28-B; rh.51-B; rh.19-B; rh.49-B; rh.52-B; rh.13-B; AAV2-B; rh.20-B; rh.24-B; rh.64-B; hu.27-B; hu.21-B; hu.22-B; hu.23-B; hu.7-C; hu.61-C; rh.56-C; hu. 9-C; hu.54-C; hu.53-C; hu.60-C; hu.55-C; hu.2-C; hu.1-C; hu.18-C; hu.3-C; hu.25-C; hu.15-C; hu.16-C; hu.11-C; hu.10-C; hu.4-C; rh.54-D; rh.48-D; rh.55-D; rh.62-D; AAV7-D; rh.52-E; rh.51-E; hu.39-E; rh.53-E; hu.37-E; rh.43-E; rh.50-E; rh.49-E; rh.61-E; hu.41-E; rh.64-E; hu.42-E; rh.57-E; rh.40-E; hu.67-E; hu.17-E; hu.6-E; hu.66-E; rh.38-E; hu.32-F; AAV9/hu; hu.31-F; Anc80; Anc81; Anc82; Anc83; Anc84; Anc94; Anc113; Anc126; Anc127; Anc80L27; Anc80L59; Anc80L60; Anc80L62; Anc80L65; Anc80L33; Anc80L36; Anc80L44; Anc80L1; Anc110; and Anc80DI.

92. The kit of any one of claim 89, wherein the at least one antibody comprises IgG.

93. The kit of any one of claims 89-92, wherein the second pharmaceutical composition is capable of neutralizing an AAV selected from AAV2; AAV1; AAV6; AAV3; AAV LK03; AAV7; AAV8; AAV hu.37; AAV rh.10; AAV9; AAV hu.68; AAV10; AAV5; AAV3-3; AAV4-4; AAV1-A; hu.46-A; hu.48-A; hu.44-A; hu.43-A; AAV6-A; hu.34-B; hu.47-B; hu.29-B; rh.63-B; hu.56-B; hu.45-B; rh.57-B; rh.35-B; rh.58-B; rh.28-B; rh.51-B; rh.19-B; rh.49-B; rh.52-B; rh.13-B; AAV2-B; rh.20-B; rh.24-B; rh.64-B; hu.27-B; hu.21-B; hu.22-B; hu.23-B; hu.7-C; hu.61-C; rh.56-C; hu. 9-C; hu.54-C; hu.53-C; hu.60-C; hu.55-C; hu.2-C; hu.1-C; hu.18-C; hu.3-C; hu.25-C; hu.15-C; hu.16-C; hu.11-C; hu.10-C; hu.4-C; rh.54-D; rh.48-D; rh.55-D; rh.62-D; AAV7-D; rh.52-E; rh.51-E; hu.39-E; rh.53-E; hu.37-E; rh.43-E; rh.50-E; rh.49-E; rh.61-E; hu.41-E; rh.64-E; hu.42-E; rh.57-E; rh.40-E; hu.67-E; hu.17-E; hu.6-E; hu.66-E; rh.38-E; hu.32-F; AAV9/hu; hu.31-F; Anc80; Anc81; Anc82; Anc83; Anc84; Anc94; Anc113; Anc126; Anc127; Anc80L27; Anc80L59; Anc80L60; Anc80L62; Anc80L65; Anc80L33; Anc80L36; Anc80L44; Anc80L1; Anc110; and Anc80DI.

94. The kit of any one of claims 89-93, wherein the at least one antibody is a monoclonal antibody.

95. The kit of any one of claims 89-94, wherein the second pharmaceutical composition comprises polyclonal antibodies obtained from at least 100 donors.

96. The kit of claim 95, wherein the second pharmaceutical composition comprises polyclonal antibodies obtained from at least 500, 1000, 5000, or 10,000 donors.

97. The kit of any one of claims 89-96, wherein the second pharmaceutical composition comprises intravenous immunoglobulin (IVIG).

98. The kit of any one of claims 89-96, wherein the second pharmaceutical composition comprises recombinant intravenous immunoglobulin (rIVIG).

99. The kit of claim 98, wherein the IVIG is a pool of antibodies obtained from: Gammagard™ Liquid® (Baxter HealthCare Corp), Gammagard™ S/D, Gammaplex™, Bivigam™, Carimune™ NF, Gamunex-C, Gammaked™, Flebogamma™ DIF, Octagam™, and Privigen™.

100. The kit of any one of claims 89-99, wherein the second pharmaceutical composition comprises recombinant polyclonal antibodies.

101. The kit of any one of claims 89-100, wherein the second pharmaceutical composition comprises an AAV-neutralizing antigen-binding fragment selected from: a single chain Fv (scFv), a Fab, a (Fab′)₂, and an (ScFv)₂.

102. The kit of any one of claims 89-101, wherein the second pharmaceutical composition comprises: a bispecific antibody, a single-domain antibody (dAb), a diabody (db), a nanobody, a unibody, and a diabody.

The application's sequence listing, which the Patent Office published only in electronic form, follows.

SEQUENCE LISTING (152 sequences)

SEQ ID NO: 1-53 - skipped (53 entries)

SEQ ID NO: 54 - protein, 736 aa, Adeno-associated virus-1
MAADGYLPDWLEDNLSEGIREWWDLKPGAPKPKANQQKQDDGRGLVLPGYKYLGPFNGLDKGEPVNAADAAALEHDKAYDQQLKAGDNPYLRYNHADAEFQERLQEDTSFGGNLGRAVFQAKKRVLEPLGLVEEGAKTAPGKKRPVEQSPQEPDSSSGIGKTGQQPAKKRLNFGQTGDSESVPDPQPLGEPPATPAAVGPTTMASGGGAPMADNNEGADGVGNASGNWHCDSTWLGDRVITTSTRTWALPTYNNHLYKQISSASTGASNDNHYFGYSTPWGYFDFNRFHCHFSPRDWQRLINNNWGFRPKRLNFKLFNIQVKEVTTNDGVTTIANNLTSTVQVFSDSEYQLPYVLGSAHQGCLPPFPADVFMIPQYGYLTLNNGSQAVGRSSFYCLEYFPSQMLRTGNNFTFSYTFEEVPFHSSYAHSQSLDRLMNPLIDQYLYYLNRTQNQSGSAQNKDLLFSRGSPAGMSVQPKNWLPGPCYRQQRVSKTKTDNNNSNFTWTGASKYNLNGRESIINPGTAMASHKDDEDKFFPMSGVMIFGKESAGASNTALDNVMITDEEEIKATNPVATERFGTVAVNFQSSSTDPATGDVHAMGALPGMVWQDRDVYLQGPIWAKIPHTDGHFHPSPLMGGFGLKNPPPQILIKNTPVPANPPAEFSATKFASFITQYSTGQVSVEIEWELQKENSKRWNPEVQYTSNYAKSANVDFTVDNNGLYTEPRPIGTRYLTRPL

SEQ ID NO: 55 - protein, 735 aa, Adeno-associated virus-2 [sequence omitted]

SEQ ID NO: 56 - protein, 736 aa, Adeno-associated virus-3
MAADGYLPDWLEDNLSEGIREWWALKPGVPQPKANQQHQDNRRGLVLPGYKYLGPGNGLDKGEPVNEADAAALEHDKAYDQQLKAGDNPYLKYNHADAEFQERLQEDTSFGGNLGRAVFQAKKRILEPLGLVEEAAKTAPGKKGAVDQSPQEPDSSSGVGKSGKQPARKRLNFGQTGDSESVPDPQPLGEPPAAPTSLGSNTMASGGGAPMADNNEGADGVGNSSGNWHCDSQWLGDRVITTSTRTWALPTYNNHLYKQISSQSGASNDNHYFGYSTPWGYFDFNRFHCHFSPRDWQRLINNNWGFRPKKLSFKLFNIQVRGVTQNDGTTTIANNLTSTVQVFTDSEYQLPYVLGSAHQGCLPPFPADVFMVPQYGYLTLNNGSQAVGRSSFYCLEYFPSQMLRTGNNFQFSYTFEDVPFHSSYAHSQSLDRLMNPLIDQYLYYLNRTQGTTSGTTNQSRLLFSQAGPQSMSLQARNWLPGPCYRQQRLSKTANDNNNSNFPWTAASKYHLNGRDSLVNPGPAMASHKDDEEKFFPMHGNLIFGKEGTTASNAELDNVMITDEEEIRTTNPVATEQYGTVANNLQSSNTAPTTGTVNHQGALPGMVWQDRDVYLQGPIWAKIPHTDGHFHPSPLMGGFGLKHPPPQIMIKNTPVPANPPTTFSPAKFASFITQYSTGQVSVEIEWELQKENSKRWNPEIQYTSNYNKSVNVDFTVDTNGVYSEPRPIGTRYLTRNL

SEQ ID NO: 57 - protein, 724 aa, Adeno-associated virus-5
MSFVDHPPDWLEEVGEGLREFLGLEAGPPKPKPNQQHQDQARGLVLPGYNYLGPGNGLDRGEPVNRADEVAREHDISYNEQLEAGDNPYLKYNHADAEFQEKLADDTSFGGNLGKAVFQAKKRVLEPFGLVEEGAKTAPTGKRIDDHFPKRKKARTEEDSKPSTSSDAEAGPSGSQQLQIPAQPASSLGADTMSAGGGGPLGDNNQGADGVGNASGDWHCDSTWMGDRVVTKSTRTWVLPSYNNHQYREIKSGSVDGSNANAYFGYSTPWGYFDFNRFHSHWSPRDWQRLINNYWGFRPRSLRVKIFNIQVKEVTVQDSTTTIANNLTSTVQVFTDDDYQLPYVVGNGTEGCLPAFPPQVFTLPQYGYATLNRDNTENPTERSSFFCLEYFPSKMLRTGNNFEFTYNFEEVPFHSSFAPSQNLFKLANPLVDQYLYRFVSTNNTGGVQFNKNLAGRYANTYKNWFPGPMGRTQGWNLGSGVNRASVSAFATTNRMELEGASYQVPPQPNGMTNNLQGSNTYALENTMIFNSQPANPGTTATYLEGNMLITSESETQPVNRVAYNVGGQMATNNQSSTTAPATGTYNLQEIVPGSVWMERDVYLQGPIWAKIPETGAHFHPSPAMGGFGLKHPPPMMLIKNTPVPGNITSFSDVPVSSFITQYSTGQVTVEMEWELKKENSKRWNPEIQYTNNYNDPQFVDFAPDSTGEYRTTRPIGTRYLTRPL

SEQ ID NO: 58 - protein, 736 aa, Adeno-associated virus-6
MAADGYLPDWLEDNLSEGIREWWDLKPGAPKPKANQQKQDDGRGLVLPGYKYLGPFNGLDKGEPVNAADAAALEHDKAYDQQLKAGDNPYLRYNHADAEFQERLQEDTSFGGNLGRAVFQAKKRVLEPFGLVEEGAKTAPGKKRPVEQSPQEPDSSSGIGKTGQQPAKKRLNFGQTGDSESVPDPQPLGEPPATPAAVGPTTMASGGGAPMADNNEGADGVGNASGNWHCDSTWLGDRVITTSTRTWALPTYNNHLYKQISSASTGASNDNHYFGYSTPWGYFDFNRFHCHFSPRDWQRLINNNWGFRPKRLNFKLFNIQVKEVTTNDGVTTIANNLTSTVQVFSDSEYQLPYVLGSAHQGCLPPFPADVFMIPQYGYLTLNNGSQAVGRSSFYCLEYFPSQMLRTGNNFTFSYTFEDVPFHSSYAHSQSLDRLMNPLIDQYLYYLNRTQNQSGSAQNKDLLFSRGSPAGMSVQPKNWLPGPCYRQQRVSKTKTDNNNSNFTWTGASKYNLNGRESIINPGTAMASHKDDKDKFFPMSGVMIFGKESAGASNTALDNVMITDEEEIKATNPVATERFGTVAVNLQSSSTDPATGDVHVMGALPGMVWQDRDVYLQGPIWAKIPHTDGHFHPSPLMGGFGLKHPPPQILIKNTPVPANPPAEFSATKFASFITQYSTGQVSVEIEWELQKENSKRWNPEVQYTSNYAKSANVDFTVDNNGLYTEPRPIGTRYLTRPL

SEQ ID NO: 59 - protein, 737 aa, Adeno-associated virus-7
MAADGYLPDWLEDNLSEGIREWWDLKPGAPKPKANQQKQDNGRGLVLPGYKYLGPFNGLDKGEPVNAADAAALEHDKAYDQQLKAGDNPYLRYNHADAEFQERLQEDTSFGGNLGRAVFQAKKRVLEPLGLVEEGAKTAPAKKRPVEPSPQRSPDSSTGIGKKGQQPARKRLNFGQTGDSESVPDPQPLGEPPAAPSSVGSGTVAAGGGAPMADNNEGADGVGNASGNWHCDSTWLGDRVITTSTRTWALPTYNNHLYKQISSETAGSTNDNTYFGYSTPWGYFDFNRFHCHFSPRDWQRLINNNWGFRPKKLRFKLFNIQVKEVTTNDGVTTIANNLTSTIQVFSDSEYQLPYVLGSAHQGCLPPFPADVFMIPQYGYLTLNNGSQSVGRSSFYCLEYFPSQMLRTGNNFEFSYSFEDVPFHSSYAHSQSLDRLMNPLIDQYLYYLARTQSNPGGTAGNRELQFYQGGPSTMAEQAKNWLPGPCFRQQRVSKTLDQNNNSNFAWTGATKYHLNGRNSLVNPGVAMATHKDDEDRFFPSSGVLIFGKTGATNKTTLENVLMTNEEEIRPTNPVATEEYGIVSSNLQAANTAAQTQVVNNQGALPGMVWQNRDVYLQGPIWAKIPHTDGNFHPSPLMGGFGLKHPPPQILIKNTPVPANPPEVFTPAKFASFITQYSTGQVSVEIEWELQKENSKRWNPEIQYTSNFEKQTGVDFAVDSQGVYSEPRPIGTRYLTRNL

SEQ ID NO: 60 - protein, 738 aa, Adeno-associated virus-8
MAADGYLPDWLEDNLSEGIREWWALKPGAPKPKANQQKQDDGRGLVLPGYKYLGPFNGLDKGEPVNAADAAALEHDKAYDQQLQAGDNPYLRYNHADAEFQERLQEDTSFGGNLGRAVFQAKKRVLEPLGLVEEGAKTAPGKKRPVEPSPQRSPDSSTGIGKKGQQPARKRLNFGQTGDSESVPDPQPLGEPPAAPSGVGPNTMAAGGGAPMADNNEGADGVGSSSGNWHCDSTWLGDRVITTSTRTWALPTYNNHLYKQISNGTSGGATNDNTYFGYSTPWGYFDFNRFHCHFSPRDWQRLINNNWGFRPKRLSFKLFNIQVKEVTQNEGTKTIANNLTSTIQVFTDSEYQLPYVLGSAHQGCLPPFPADVFMIPQYGYLTLNNGSQAVGRSSFYCLEYFPSQMLRTGNNFQFTYTFEDVPFHSSYAHSQSLDRLMNPLIDQYLYYLSRTQTTGGTANTQTLGFSQGGPNTMANQAKNWLPGPCYRQQRVSTTTGQNNNSNFAWTAGTKYHLNGRNSLANPGIAMATHKDDEERFFPSNGILIFGKQNAARDNADYSDVMLTSEEEIKTTNPVATEEYGIVADNLQQQNTAPQIGTVNSQGALPGMVWQNRDVYLQGPIWAKIPHTDGNFHPSPLMGGFGLKHPPPQILIKNTPVPADPPTTFNQSKLNSFITQYSTGQVSVEIEWELQKENSKRWNPEIQYTSNYYKSTSVDFAVNTEGVYSEPRPIGTRYLTRNL

SEQ ID NO: 61 - protein, 736 aa, Adeno-associated virus-9
MAADGYLPDWLEDNLSEGIREWWALKPGAPQPKANQQHQDNARGLVLPGYKYLGPGNGLDKGEPVNAADAAALEHDKAYDQQLKAGDNPYLKYNHADAEFQERLKEDTSFGGNLGRAVFQAKKRLLEPLGLVEEAAKTAPGKKRPVEQSPQEPDSSAGIGKSGAQPAKKRLNFGQTGDTESVPDPQPIGEPPAAPSGVGSLTMASGGGAPVADNNEGADGVGSSSGNWHCDSQWLGDRVITTSTRTWALPTYNNHLYKQISNSTSGGSSNDNAYFGYSTPWGYFDFNRFHCHFSPRDWQRLINNNWGFRPKRLNFKLFNIQVKEVTDNNGVKTIANNLTSTVQVFTDSDYQLPYVLGSAHEGCLPPFPADVFMIPQYGYLTLNDGSQAVGRSSFYCLEYFPSQMLRTGNNFQFSYEFENVPFHSSYAHSQSLDRLMNPLIDQYLYYLSKTINGSGQNQQTLKFSVAGPSNMAVQGRNYIPGPSYRQQRVSTTVTQNNNSEFAWPGASSWALNGRNSLMNPGPAMASHKEGEDRFFPLSGSLIFGKQGTGRDNVDADKVMITNEEEIKTTNPVATESYGQVATNHQSAQAQAQTGWVQNQGILPGMVWQDRDVYLQGPIWAKIPHTDGNFHPSPLMGGFGMKHPPPQILIKNTPVPADPPTAFNKDKLNSFITQYSTGQVSVEIEWELQKENSKRWNPEIQYTSNYYKSNNVEFAVNTEGVYSEPRPIGTRYLTRNL

SEQ ID NO: 62 - protein, 738 aa, Adeno-associated virus-10
MAADGYLPDWLEDNLSEGIREWWDLKPGAPKPKANQQKQDDGRGLVLPGYKYLGPFNGLDKGEPVNAADAAALEHDKAYDQQLKAGDNPYLRYNHADAEFQERLQEDTSFGGNLGRAVFQAKKRVLEPLGLVEEAAKTAPGKKRPVEPSPQRSPDSSTGIGKKGQQPAKKRLNFGQTGESESVPDPQPIGEPPAGPSGLGSGTMAAGGGAPMADNNEGADGVGSSSGNWHCDSTWLGDRVITTSTRTWALPTYNNHLYKQISNGTSGGSTNDNTYFGYSTPWGYFDFNRFHCHFSPRDWQRLINNNWGFRPKRLSFKLFNIQVKEVTQNEGTKTIANNLTSTIQVFTDSEYQLPYVLGSAHQGCLPPFPADVFMIPQYGYLTLNNGSQAVGRSSFYCLEYFPSQMLRTGNNFEFSYTFEDVPFHSSYAHSQSLDRLMNPLIDQYLYYLSRTQSTGGTQGTQQLLFSQAGPANMSAQAKNWLPGPCYRQQRVSTTLSQNNNSNFAWTGATKYHLNGRDSLVNPGVAMATHKDDEERFFPSSGVLMFGKQGAGRDNVDYSSVMLTSEEEIKTTNPVATEQYGVVADNLQQANTGPIVGNVNSQGALPGMVWQNRDVYLQGPIWAKIPHTDGNFHPSPLMGGFGLKHPPPQILIKNTPVPADPPTTFSQAKLASFITQYSTGQVSVEIEWELQKENSKRWNPEIQYTSNYYKSTNVDFAVNTEGTYSEPRPIGTRYLTRNL

SEQ ID NO: 63 - protein, 736 aa, Adeno-associated virus
MAADGYLPDWLEDNLSEGIREWWALKPGAPQPKANQQHQDNARGLVLPGYKYLGPGNGLDKGEPVNEADAAALEHDKAYDQQLKAGDNPYLKYNHADAEFQERLKEDTSFGGNLGRAVFQAKKRLLEPLGLVEEAAKTAPGKKRPVEQSPQEPDSSVGIGKSGAQPAKKRLNFGQTGDTESVPDPQPIGEPPAAPSGVGSLTMASGGGAPVADNNEGADGVGSSSGNWHCDSQWLGDRVITTSTRTWALPTYNNHLYKQISNSTSGGSSNDNAYFGYSTPWGYFDFNRFHCHFSPRDWQRLINNNWGFRPKRLNFKLFNIQVKEVTDNNGVKTIANNLTSTVQVFTDSDYQLPYVLGSAHEGCLPPFPADVFMIPQYGYLTLNDGSQAVGRSSFYCLEYFPSQMLRTGNNFQFSYEFENVPFHSSYAHSQSLDRLMNPLIDQYLYYLSKTINGSGQNQQTLKFSVAGPSNMAVQGRNYIPGPSYRQQRVSTTVTQNNNSEFAWPGASSWALNGRNSLMNPGPAMASHKEGEDRFFPLSGSLIFGKQGTGRDNVDADKVMITNEEEIKTTNPVATESYGQVATNHQSAQAQAQTGWVQNQGILPGMVWQDRDVYLQGPIWAKIPHTDGNFHPSPLMGGFGMKHPPPQILIKNTPVPADPPTAFNKDKLNSFITQYSTGQVSVEIEWELQKENSKRWNPEIQYTSNYYKSNNVEFAVNTEGVYSEPRPIGTRYLTRNL

SEQ ID NO: 64 - protein, 736 aa, Artificial Sequence
  Description of Artificial Sequence: Synthetic polypeptide
MAADGYLPDWLEDNLSEGIREWWALQPGAPKPKANQQHQDNARGLVLPGYKYLGPGNGLDKGEPVNAADAAALEHDKAYDQQLKAGDNPYLKYNHADAEFQERLKEDTSFGGNLGRAVFQAKKRLLEPLGLVEEAAKTAPGKKRPVDQSPQEPDSSSGVGKSGKQPARKRLNFGQTGDSESVPDPQPLGEPPAAPTSLGSNTMASGGGAPMADNNEGADGVGNSSGNWHCDSQWLGDRVITTSTRTWALPTYNNHLYKQISSQSGASNDNHYFGYSTPWGYFDFNRFHCHFSPRDWQRLINNNWGFRPKKLSFKLFNIQVKEVTQNDGTTTIANNLTSTVQVFTDSEYQLPYVLGSAHQGCLPPFPADVFMVPQYGYLTLNNGSQAVGRSSFYCLEYFPSQMLRTGNNFQFSYTFEDVPFHSSYAHSQSLDRLMNPLIDQYLYYLNRTQGTTSGTTNQSRLLFSQAGPQSMSLQARNWLPGPCYRQQRLSKTANDNNNSNFPWTAASKYHLNGRDSLVNPGPAMASHKDDEEKFFPMHGNLIFGKEGTTASNAELDNVMITDEEEIRTTNPVATEQYGTVANNLQSSNTAPTTRTVNDQGALPGMVWQDRDVYLQGPIWAKIPHTDGHFHPSPLMGGFGLKHPPPQIMIKNTPVPANPPTTFSPAKFASFITQYSTGQVSVEIEWELQKENSKRWNPEIQYTSNYNKSVNVDFTVDTNGVYSEPRPIGTRYLTRPL

SEQ ID NO: 65 - protein, 735 aa, Adeno-associated virus
MAADGYLPDWLEDTLSEGIRQWWKLKPGPPPPKPAERHKDDSRGLVLPGYKYLGPFNGLDKGEPVNEADAAALEHDKAYDRQLDSGDNPYLKYNHADAEFQERLKEDTSFGGNLGRAVFQAKKRVLEPLGLVEEPVKTAPGKKRPVEHSPVEPDSSSGTGKAGQQPARKRLNFGQTGDADSVPDPQPLGQPPAAPSGLGSTTMATGSGAPMADNNEGADGVGNSSGNWHCDSQWLGDRVITTSTRTWALPTYNNHLYKQISSQSGASNDNHYFGYSTPWGYFDFNRFHCHFSPRDWQRLINNNWGFRPKRLNFKLFNIQVKEVTQNGGTTTIANNLTSTVQVFTDSEYQLPYVLGSAHQGCLPPFPADVFMVPQYGYLTLNNGSQAVGRSSFYCLEYFPSQMLRTGNNFQFSYTFEDVPFHSSYAHSQSLDRLMNPLIDQYLYYLNKTQTNSGTLQQSRLLFSQAGPTNMSLQAKNWLPGPCYRQQRLSKQANGNNNSNFPWTAATKYHLNGRDSLVNPGPAMASHKDDEEKFFPMHGTLIFGKQGTNANDADLENVMITDEEEIRATNPVATEQYGTVSNNLQNSNTGPTTGTVNHQGALPGMVWQDRDVYLQGPIWAKIPHTDGHFHPSPLTGGFGLKHPPPQIMIKNTPVPANPPTNFSSAKFASFITQYSTGQVSVEIEWELQKENSKRWNPEIQYTSNYNKSVNVDFTVDTNGVYSEPRPIGTRYLTRNL

SEQ ID NO: 66 - protein, 735 aa, Adeno-associated virus
MAADGYPPDWLEDTLSEGIRQWWKLKPGPPPPKPAERHKDDSRGLVLPGYKYLGPFNGLDKGEPVNEADAAALEHDKAYDRQLDSGDNPYLKYNHADAEFQERLKEDTSFGGNLGRAVFQAKKRVLEPLGLVEEPVKTAPGKKRPVEHSPVEPDSSSGTGKAGQRPARKRLNFGQTGDADSVPDPQPLGQPPAAPSGLGSTTMATGSGAPMADNNEGADGVGNSSGNWHCDSQWLGDRVITTSTRTWALPTYNNHLYKQISSQSGASNDNHYFGYSTPWGYFDFNRFHCHFSPRDWQRLINNNWGFRPKRLNFKLFNIQVKEVTQNDGTTTIANNLTSTVQVFTDSEYQLPYVLGSAHQGCLPPFPADVFMVPQYGYLTLNNGSQAVGRSSFYCLEYFPSQMLRTGNNFQFSYTFEDVPFHSSYAHSQSLDRLMNPLIDQYLYYLNKTQTNSGTLQQSRLLFSQAGPTNMSLQAKNWLPGPCYRQQRLSKQANDNNNSNFPWTAATKYHLNGRDSLVNPGPAMASHKDDEEKFFPMHGTLIFGKQGTNANDADLENVMITDEEEIRATNPVATEQYGTVSNNLQNSNTGPTTGTVNRQGALPGMVWQDRDVYLQGPIWAKIPHTDGHFHPSPLMGGFGLKHPPPQIMIKNTPVPANPPTNFSSAKFASFITQYSTGQVSVEIEWELQKENSKRWNPEIQYTSNYNKSVNVDFTVDTNGVYSEPRPIGTRYLTRNL

SEQ ID NO: 67 - protein, 736 aa, Adeno-associated virus
MAADGYLPDWLEDTLSEGIRQWWKLKPGPPPPKPAERHKDDSRGLVLPGYKYLGPFNGLDKGEPVNEADAAALEHDKAYDRQLDSGDNPYLKYNHADAEFQERLKEDTSFGGNLGRAVFQAKKRVLEPLRPGLRKPVKTAPGKKRPVEHSPVEPDSSSGTGKAGQQPARKRLNFGQTGDADSVPDPQPLGQPPAAPSGLGSTTMATGSGAPMADNNEGADGVGNSSGNWHCDSQWLDDRVIATSTRTWALPTYNNHLYKQISSQSGACNDNHYFGYSTPWGYFDFNRFHCHFSPRDWQRLINSNWGFRPKRLNFKLFNIQVKEVTQNDGTTTIANNLTSTVQVFTDSEYQLPYVPGSAHQGCLPPFPADVFMVPQYGYLTLNNGSQAVGRSSFYCLEYFPSQMLRTGNNFQFSYTFEDVPFHSSYAHCQSLDRLMNPLIDQYLYYLNKTQTNSGTLQQSRLLFSQAGPTNMSLQAKNWLPGPCYRQQRLSKQANDNNNCNFPWTAATKYHLNGRDSLVNPGPAMASHKDDEEKFFPMHGTLIFGKQGTNANDADLENVMITDEEEIRPTNPVATEQYGTVSNNLQNSNTGPTTGTVNHQGALPGMVWQDRDVYLQGPIWAKIPHTDGHFHPSPLMGGFGLKHPPPQIMIKSTPVPANPPTNFSSAKFASSITQYSTGQVSVEIEWELQKENSKRWNPEIQYTSNYNKSVNVDFTVDTNGVYSEPRPIGTRYLTRNL

SEQ ID NO: 68 - protein, 735 aa, Adeno-associated virus
MAADGYLPDWLEDTLSEGIRQWWKLKPGPPPPKPAERHKDDSRGLVLPGYKYLGPFNGLDKGEPVNEADAAALEHDKAYDRQLDSGDNPYLKYNHADAEFQERLKEDTSFGGNLGRAVFQAKKRVLEPLGLVEEPVKTAPGKKRPVEHSPVEPDSSSGTGKAGQQPARKRLNFGQTGDADSVPDPQPLGQPPAAPSGLGSTTMATGSGAPMADNNEGADGVGNSSGNWHCDSQWLGDRVITTSTRTWALPTYNNHLYKQISSQSGASNDNHYFGYSTPWGYFDFNRFHCHFSPRDWQRLVNNNRGFRPKRLNFKLFNIQVKEVTQNDGTTTIANNLTSTVQVFTDSEYQLPYVLGSAHQGCLPPFPADVFMVPQYGYLTLNNGSQAVGRSSFYCLEYFPSQMLRTGNNFQFSYTFEDVPFHSSYAHSQSLDRLMNPLIDQYLYYLNKTQTNSGTLQQSRLLFSQAGPTNMSLQAKNWLPGPCYRQQRLSKQANDNNNSNFPWTAATKYHLNGRDSLVNPGPAMASHKDDEEKFFPMHGTLIFGKQGTNANDADLENVMITDEEEIRATNPVATEQYGTVSNNLQNSNTGPTTGTVNHQGALPGMVWQDRDVYLQGPIWAKIPHTDGHFHPSPLMGGFGLKHPPPQIMIKNTPVPANPPTNFSSAKFASFITQYSTGQVSVEIEWELQKENSKRWNPEIQYTSNYNKSVNVDFTVDTNGVYSEPRPIGTRYLTRNL

SEQ ID NO: 69 - protein, 738 aa, Adeno-associated virus
MAADGYLPDWLEDNLSEGIREWWDLKPGAPKPKANQQKQDDGRGLVLPGYKYLGPFNGLDKGEPVNAADAAALEHDKAYDQQLKAGDNPYLRYNHADAEFQERLQEDTSFGGNLGRAVFQAKKRVLEPLGLVEEGAKTAPGKKRPVEPSPQRSPDSSTGIGKTGQQPAKKRLNFGQTGDSESVPDPQPIGEPPAGPSGLGSGTMAAGGGAPMADNNEGADGVGSSSGNWHCDSAWLGDRVITTSTRPWALPTYNNHLYKQISNGTSGGSTNDNTYFGYSTPWGYFDFNRFHCHFSPRDWQRLINNNWGFRPKRLNFKLFNIQVKEVTQNEGTKTIANNLTSTIQVFTDSEYQLPYVLGSAHQGCPPPFPADVFMIPQYGYLTLNNGSQAVGRSSFYCLEYFPSQMRRTGNNFEFSYQFEDVPFHSSYAHSQSLDRLMNPLIDQYLYYLSRTQSTGGTAGTQQLLFSQAGPNNMSAQAKNWLPGPCYRQQRVSTTLSQNNNSNFAWTGATKYHLNGRDSLVNPGVAMATHKDDEERFFPSSGVLMFGKQGAGKDNVDYSSVMLTSEEEIKTTNPVATEQYGVVADNLQQQNAAPIVGAVNSQGALPGMVWQNRDVYLQGPIWAKIPHTDGNFHPSPLMGGFGLKHPPPQILIKNTPVPADPPTTFSQAKLASFITQYSTGQVSVEIEWELQKENSKRWNPEIQYTSNYYKSTNVDFAVNTEGTYSEPRPIGTRYLTRNL

SEQ ID NO: 70 - protein, 735 aa, Adeno-associated virus
MAADGYLPDWLEDTLSEGIRQWWKLKPGPPPPKPAERHKDDSRGLVLPGYKYLGPFNGLDKGEPVNEADAAALEHDKAYDRQLDSGDNPYLKYNHADAEFQERLKEDTSFGGNLGRAVFQAKKRVLEPLGLVEGPVKTAPGKKRPVEHSPAEPDSSSGTGKAGQQPARKRLNFGQTGDADSVPDPQPLGQPPAAPSGLGSTTMATGSGAPMADNNEGADGVGNSSGNWHCDSQWLGDRVITTSTRTWALPTYNNHLYKQISSQSGASNDNHYFGYSTPWGYFDFNRFHCHFSPRDWQRLINNNWGFRPKRLNFKLFNIQVKEVTQNDGTTTIANNLTSTVQVFTDSEYQLPYVLGSAHQGCLPPFPADVFMVPQYGYLTLNNGSQAVGRSSFYCLEYFPSQMLRTGNNFQFSYTFEDVPFHSSYAHSQSLDRLMNPLIDQYLYYLNKTQSNSGTLQQSRLLFSQAGPTSMSLQAKNWLPGPCYRQQRLSKQANDNNNSNFPWTAATKYHLNGRDSLVNPGPAMASHKDDEEKFFPMHGTLIFGKQGTNANDADLDNVMITDEEEIRTTNPVATEQYGYVSNNLQNSNTGPTTGTVNHQGALPGMVWQDRDVYLQGPIWAKIPHTDGHFHPSPLMGGFGLKHPPPQIMIKNTPVPANPPTNFSSAKFASFITQYSTGQVSVEIEWELQKENSKRWNPEIQYTSNYNKSVNVDFTVDTNGVYSEPRPIGTRYLTRNL

SEQ ID NO: 71 - protein, 735 aa, Adeno-associated virus
MAADGYLPDWLEDTLSEGIRQWWKLKPGPPPPKPAERHQDNSRGLVLPGYKYLGPSNGLDKGEPVNEADAAALEHDKAYDRQLDSGDNPYLKYNHADAEFQERLKEDTSFGGNLGRAVFQAKKRVLEPLGLVEEPVKTAPGKKRPVEHSPVEPDSSSGTGKAGHQPARKRLNFGQTGDADSVPDPQPLGQPPAAPTSLGSTTMATGSGAPMADNNEGADGVGNSSGNWHCDSQWLGDRVITTSTRTWALPTYNNHLYKQISSQSGASNDNHYFGCSTPWGYFDFNRFHCHFSPRDWQRLINNNWGFRPKRLNFKLFNIQVKEVTQNDGTTTIANNLTSTVQVFTDSEYPLPYVLGSAHQGCLPPFPADVFMVPQYGYLTLNNGSQAVGRSSFYCLEYFPSQMLRTGNNFTFSYTFEDVPFHSSYAHSQSLDRLMNPLIDQYLYYLNRTQSNSGTLQQSRLLFSQAGPTSMSLQAKNWLPGPCYRQQRLSKQANDNNNSNFPWTAATKYHLNGRDSLVNPGPAMASHKDDEEKFFPMHGTLIFGKQGTNANDADLEHVMITDEEEIRTTNPVATEQYGNVSNNLQNSNTGPTTENVNHQGALPGMVWQDRDVYLQGPIWAKIPHTDGHFHPSPLMGGFGLKHPPPQIMIKNTPVPANPPTNFSSAKFASFITQYSTGQVSVEIEWELQKENSKRWNPEIQYTSNYNKSVNVDFTVDTNGVYSEPCPIGTRYLTRNL

SEQ ID NO: 72 - protein, 735 aa, Adeno-associated virus
MAADGYLPDWLEDTLSEGIRQWWKLKPGPPPPKLAERHQDDSRGLVLPGYKYLGPFNGLDKGEPVNEADAAALEHDKAYDRQLDSGDNPYLKYNHADAEFQERLKEDTSFGGNLGRAVFQAKKRVLEPLGLVEEPVKTAPGKKRPVEHSPVEPDSSSGTGKAGHQPARKRLNFGQTGDADSVPDPQPLGQPPAAPTSLGSTTMATGSGAPMADNNEGADGVGNSSGNWHCDSQWLGDRVITTSTRTWALPTYNNHLYKQISSQSGASNDNHYFGYSTPWGYFDFNRFHCHFSPRDWQRLINNNWGFRPKRLNFKLFNIQVKEVTQNDGTTTIANNLTSTVQVFTDSEYQLPYVLGSAHQGCLPPFPADVFTVPQYGYLTLNNGSQAVGRSSFYCLEYFPSQMLRTGNNLTFSYTFEDVPFHSSYAHSQSLDRLMNPLIDQYLYYLNRTQSNSGTLQQSRLLFSQAGPTSMSLQAKNWLPGPCYRQQRLSKQANDNNNSNFPWTAATKYHLNGRDSLVNPGPAMASHKDDEEKFFPMHGTLIFGKQGTNANDADLEHVMITDEEEIRTTNPVATEQYGNVSNNLQNSNTGPTTENVNHQGALPGMVWQDRDVYLQGPIWAKIPHTDGHFHPSPLMGGFGLKHPPPQIMIKNTPVPANPPTNYSSAKFASFITQYSTGQVSVEIEWELRKENSKRWNPEIQYTSNYNKSVNVDFTVDTNGVYSEPRPIGTRYLTRNL

SEQ ID NO: 73 - protein, 735 aa, Adeno-associated virus
MAADGYLPDWLEDTLSEGIRQWWKLKPGPPPPKPAERHQDDSRGLVLPGYKYLGPFNGLDKGEPVNEADAAALEHDKAYDRQLDSGDNPYLKYNHADAEFQERLKEDTSFGGNLGRAVFQAKKRVLEPLGLVEEPVKTAPGKKRPVEHSPVEPDSSSGTGKAGHQPARKRLNFGQTGDADSVPDPQPLGQPPAAPTSLGSTTMATGSGAPMADNNEGADGVGNSSGNWHCDSQWLGDRVITTSTRTWALPTYNNHLYKQISSQSGASNDNHYFGYSTPWGYFDFNRFHCHFSPRDWQRLINNNWGFRPKRLNFKLFNIQVKEVTQNDGTTTIANNLTSTVQVFTDSEYQLPYVLGSAHQGCLPPFPADVFMVPQYGYLTLNNGSQAVGRSSFYCLEYFPSQMLRTGNNFTFSYTFEDVPFHSSYAHSQSLDRLMNPLIDQYLYYLNRTQSNSGTLQQSRLLFSQAGPTSMSLQAKNWLPGPCYRQQRLSKQANDNNNSNFPWTAATKYRLNGRDSLVNPGPAMASHKDDEEKFFPMHGTLIFGKQGTNANDADLEHVMITDEEEIRTTNPVATEQYGNVSNNLQNSNTGPTTENVNHQGALPGMVWQDRDVYLQGPIWAKIPHTDGHFHPSPLMGGFGLKHPPPQIMIKNTPVPANPPTNFSSAKFASFITQYSTGQVSVEIEWELQKENSKRWNPEIQYTSNYNKSVNVDFTVDTNGVYSEPRPIGTRYLTRNL

SEQ ID NO: 74 - protein, 735 aa, Adeno-associated virus
MAADGYLPDWLEDTLSEGIRQWWKLKPGPPPPKPAERHKDDSRGLVLPGYKYLGPFNGLYKGEPVDEADAAALEHDKAYDRQLDSGDNPYLKYNHADAEFQERLKEDTSFGGNLGRAVFQAKKRVLEPLGLVGEPVKTAPGKKRPVEHSPVEPDSSSGTGKAGNQPARKRLNFGQTGDADSVPDPQPLGQPPAAPSGLGSTTMATGSGAPVADNNEGADGVGNSSGNWHCDSQWLGDRVITTSTRTWALPTYNNHLYKQISSQSGASNDNHYFGYSTPWGYFDFNRFHCHFSPRDRQRLINNNWGFRPKRLNFKLFNIQVKEVTQNDGTTTIANNLTSTVQVFTDSGYQLPYVLGLAHQGCLPPFPADVFMVPQYGYLTLNNGSQAVGRSSFYCLEYFPSQMLRTGNNFQFSYTFEDVPFHSSYAHSQSLDRLMNPLIDQYLYYLNKTQSNSGTLQQSRLLFSQAGPTSMSLQAKNWLPGPCYRQQRLSKQANDNNNSNFPWTAATKYHLNGRDSLVNPGPAMASHKDDEEKFFPMHGTLIFGKQGTNANDADLDNVMITDEEEIRTTNPVATEQYGYVSNNLQNSNTGPTTGTVNHQGALPGMVWQDRDVYLQGPIWAKIPHTDGHFHPSPLMGGFGLKHPPPQIMIKNTPVPANPPTNFSSAKFASFITQYSTGQVSVEIEWELQKEDSKRWNPEIQYTSNYNKPVNVDFTVDTNGVYSEPRPIGTRYLTRNL

SEQ ID NO: 75 - protein, 735 aa, Adeno-associated virus
MAADGYLPDWLEDTLSEGIRQWWKLKPGPPPPKPAERHKDDSRGLVLPGYKYLGPFNGLYKGEPVNEADAAALEHDKAYDRQLDSGDNPYLKYNHAGAEFQERLKEDTSFGGNLGRAVFQAKKRVLEPLGLVEEPVKTAPGKKRPVEHSPVEPDSSSGTGKAGNQPARKRLNFGQTGDADSVPDPQPLGQPPAAPSGLGSTTMATGSGAPVADNNEGADGVGNSSGNWHCDSQWLGDRVITTSTRTWALPTYNNHLYKQISSQSGASNDNHYFGYSTPWGYFDFNRFHCHFSPRDWQRLINNNWGFRPKRLNFKLFNIQVKEVTQNDGTTTIANNLTSTVQVFTDSEYQLPYVLGSAHQGCLPPFPADVFMVPQYGYLTLNNGSQAVGRSSFYCLEYFPSQMLRTGNNFQFSYTFEDVPFHSSYAHSQSLDRLMNPLIDQYLYYLNKTQSNSGTLQQSRLLFSQAGPTSMSLQAKNWLPGPCYRQQRLSKQANDNNNSNFPWTAATKYHLNGRDSLVNPGPAMASHKDDEEKFFPMHGTLIFGKQGTNANDADLDNVMITDEEEIRTTNPVATEQYGYVSNNLQDSNTGPTTGTVNHQGALPGMVWQDRDVYLQGPIWAKIPHTDGHFHPSPLMGGFGLKHPPPQIMIKNTPVPANPPTNFSSAKFASFITQYSTGQVSVEIEWELQKENSKRWNPEIQYTSNYNKSVNVDFTVDTNGVYSEPRPIGTRYLTRNL

SEQ ID NO: 76 - protein, 738 aa, Adeno-associated virus
MAADGYLPDWLEDNLSEGIREWWDLKPGAPKPKANQQKQDDGRGLVLPGCKYLGPFNGLDKGEPVNAADAAALEHDKAYDQQLKAGDNPYLRYNHADAEFQERLQEDTSFGGNLGRAVFQAKKRVLEPLGLVEEGAKTAPGKKRPVEPSPQRSPDSSTGIGKTGQQPAKKRLNFGQTGDSESVPDPQPIGEPPAGPSGLGSGTMAAGGGAPMADNNEGADGVGSSSGNWHCDSTWLGDRVITTSTRTWALPTYNNHLYKQISNGTSGGSTNDNTYFGYSTPWGYFDFNRFHCHFSPRDWQRLINNNWGFRPKRLNFKLFNIQVKEVTQNEGTKTIANNLTSTIQVFTDSEYQLPYVLGSAHQGCPPPFPADVFMIPQYGYLTLNNGSQAVGRSSFYCLEYFPSQMRRTGNNFEFSYQFEDVPFHSSYAHSQSLDRLMNPLIDQYLYYLSRTQSTGGTAGTQQLLFSQAGPNNMSAQAKNWLPGPCYRQQRVSTTLSQNNNSNFAWTGATKYHLNGRDSLVNPGVAMATHKDDEERFFPSSGVLMFGKQGAGKDNVDYSSVMLTSEEEIKTTNPVATEQYGVVADNLQQQNAAPIVGAVNSQGALPGMVWQNRDVYLQGPIWAKIPHTDGNFHPSPLMGGFGLKHPPPQILIKNTPVPADPPTTFSQAKLASFITQYSTGQVSVEIEWELQKENSKRWNPEIQYTSNYNKSVNVDFTVDTNGVYSEPRPIGTRYLTRNL

SEQ ID NO: 77 - protein, 735 aa, Adeno-associated virus
MAADGYLPDWLEDTLSEGIRQWWKLKPGPPPPKPAERHKDDSRGLVLPGYKYLGPFNGLDKGEPVNEADAAALEHDKAYDRQLESGDNPYLKYNHADAEFQERLKEDTSFGGNLGRAVFQAKKRVLEPLGLVEEPVKTAPGKKRPVEHSPVEPDSSSGTGKAGQQPARKRLNFGQTGDADSVPDPQPLGQPPAAPSGLGSTTMASGSGAPVADNNEGADGVGNSSGNWHCDSQWLGDRVITTSTRTWALPTYNNHLYKQISSQSGASNDNHYFGYSTPWGYFDFNRFHCHFSPRDWQRLINNSWGFRPKRLNFKLFNIQVKEVTQNDGTTTIANNLTSTVQVFTDSEYQLPYVLGSAHQGCLPPFPADVFMVPQYGYLTLNNGSQAVGRSSFYCLEYFPSQMLRTGNNFQFSYTFEDVPFHSSYAHSQSLDRLLNPLIDQYLYYLNKTQSNSGTLQQSRLLFSQAGPTSMSLQAKNWLPGPCYRQQRLSKQANDNNNSNFPWTAATKYHLNGRDSLVNPGPAMASHKDDEEKFFPMHGTLIFGKQGTNANDADLDNVMITDEEEIRTTNPVATEQYGYVSNNLQNSNTGPTTGTVNHQGALPGMVWQDRDVYLQGPIWAKIPHTDGHFHPSPLMGGFGLKHPPPQIMIKNTPVPANPPTNFSSSKFASFITQYSTGQVSVEIEWELQKENSKRWNPEIQYTSNYNKSVNVDFTVDTNGVYSEPRPIGTRYPTRNL

SEQ ID NO: 78 - protein, 735 aa, Adeno-associated virus
MAADGYLPDWLEDTLSEGIRQWWKLKPGPPPPKPAERHKDDSRGLVLPGYRYLGPFNGLDKGEPVNEADAAALEHDKAYDRQLDSGDNPYLKYNHVDAEFQERLKEDTSFGGNLGRAVFQAKKRILEPLGLVEEPVKAAPGEKRPVEHSPAEPDSSSGTGKAGQQPARKRLNFGQTGDADSVPDPQPLGQPPAAPSGLGTNTMASGSGAPMADNNEGADGVGNSSGNWHCDSTWMGDRVITTSTRTWALPTYNNHLYKQISSQSGASNDNHYFGYSTPWGHFDFNRFHCHFSPRDWQRLINNNWGFRPKRLSFKLFNIQVKEVTQNDGTTTIANNLTSTVQVFTDSEYQLPYVLGSAHQGCLPPFPADVFMVPQYGYLTLNNGSQAVGRSSFYCLEYFPSQMLRTGNNFTFSYTFEDVPFHSSYAHSQSLDRLMNPLIDQYLYYLSRTNTPSGTTTMSRLQFSQAGASDIRDQSRNWLPGPCYRQQRVSKTAADNNNSDYSWTGATKYHLNGRDSLVNPGPAMASHKDDEEKYFPQSGVLIFGKQDSGKTNVDIEKVMITDEEEIRTTNPVATEQYGSVSTNLQSGNTQAATSDVNTQGVLPGMVWQDRDVYLQGPIWAKIPHTDGHFHPSPPMGGFGLKHPPPQILIKNTPVPANPSTTFSAAKFASFITQYSTGQVSVEIEWELQKENSKRWNPEIQYTSNYNKSVNVDFTVDTNGVYSEPRPIGARYLTRNL

SEQ ID NO: 79 - protein, 735 aa, Adeno-associated virus
MAADGYLPDWLEDTLSEGIRQWWKLKPGPPPPKPAERHKDDSRGLVLPGYKYLGPFNGLDKGEPVNEADAAALEHDKAYDRQLDSGDNPYLKYNHADAEFQERLKEDTSFGGNLGRAVFQAKKRILEPLGLVEEPVKTAPGKKRPVEHSPAEPDSSSGTGKAGQQPARKRLNFGQTGDADSVPDPRPLGQPPAAPSGLGTNTMASGSGAPMADNNEGADGVGNSSGNWHCDSTWMGDRVITTSTRTWALPTYNNHLYKQISSQSGASNDNHYFGYSTPWGYFDFNRFHCHFSPRDWQRLINNNWGFRPKRLSFKLFNIQVKEVTQNDGTTTIANNLTSTVQVFTDSEYQLPYVLGSAHQGCLPPFPADVFMVPQYGYLTLNNGSQAVGRSSFYCLEYFPSQMLRTGNNFTFSYTFEDVPFHSSYAHSQSLDRLMNPLIDQYLYYLSRTNTPSGTTTMSRLQFSQAGASDIRDQSRNWLPGPCYRQQRVSKTAADNNNSDYSWTGATKYHLNGRDSLVNPGPAMASHKDDEEKYFPQSGVLIFGKQDSGKTNVDIEKVMITDEEEIRTTNPVATEQYGSVSTNLQSGNTQAATSDVNTQGVLPGMVWQDRDVYLQGPIWAKIPHTDGHFHPSPLMGGFGLKHPPPQILIKNTPVPANPSTTFSAAKFASFITQYSTGQVSVEIEWELQKENSKRWNPEIQYTSNYNKSVNVDFTVDTNGVYSEPRPIGTRYLTRNL

SEQ ID NO: 80 - protein, 735 aa, Adeno-associated virus
MAADGYLPDWLEDTLSEGIRQWWKLKPGPPPPKPAERHKDDSRGLVLPGYKYLGPFNGLDKGEPVNEADAAALEHDKAYDRQLDSGDNPYLKYNHADAEFQERLKGDTSFGGNLGRAVFQAKKRILEPLGLVEEPVKTAPGKKRPVEHSPAEPDSSSGTGKAGQQPARKRLNFGQTGDADSVPDPQPLGQPPAAPSGLGTNTMASGSGAPMADNNEGADGVGNSSGNWHCDSTWMGGRVITTSTRTWALPTYNNHLYKQISSQSGASNDNHYFGYSTPWGYFDFNRFHCHFSPRDWQRLINNNWGFRPKRLSFKLFNIQVKEVTQNDGTTTIANNLTSTVQVFTDSEYQLPYVLGSAHQGCLPPFPADVFMVPQYGYLTLNNGSQAVGRSSFYCLEYFPSQTLRTGNNFTFSYTFEDVPFHSSYAHSQSLDRLMNPLIDQYLYYLSRTNTPSGTTTMSRLQFSQAGASDIRDQSRNWLPGPCYRQQRVSKTAADNNNSDYSWTGATKYHLNGRDSLVNPGPAMASHKDDEEKYFPQSGVLIFGKQDSGKTNVDIEKVMITDEEEIRTTNPVATEQYGSVSTNLQSGNTQAATSDVNTQGVLPGMVWQDRDVYLQGPIWAKIPHTDGHFHPSPLMGGFGLKHPPPQILIKNTPVPANPSTTFSAAKFASFITQYSTGQVSVEIEWELQKENSKRWNPEIQYTSNYNKSVNVDFTVDTNGVYSEPRPIGTRYLTRNL

SEQ ID NO: 81 - protein, 735 aa, Adeno-associated virus
MAADGYLPDWLEDTLSEGIRQWWKLKPGPPPPKPAERHKDDSRGLVLPGYKYLGPFNGLDKGEPVNEADAAALEHDKAYDRQLDSGDNPYLKYNHADAEFQERLKEDTSFGGNLGRAVFQAKKRILEPLGLVEEPVKTAPGKKRPVEHSPAEPDSSSGTGKAGQQPARKRLNFGQTGDADSVPDPQPLGQPPAAPSGLGTNTMASGSGAPMADNNEGADGVGNSSGNWHCDSTWMGDRVITTSTRTWALPTCNNHLYKQISSQSGASNDNHYFGYSTPWGYFDFNRFHCHFSPRDWQRLINNNWGFRPKRLSFKLFNIQVKEVTQNDGTTTIANNLTSTVQVFTDSEYQLPYVLGSAHQGCLPPFPADVFMVPQYGYLTLNNGSQAVGRSSFYCLEYFPSQMLRTGNNFTFSYTFEDVPFHSSYAHSQSLDRLMNPLIDQYLYYLSRTNTPSGTTTMSRLQFSQAGASDIRDQSRNWLPGPCYRQQRVSKTAADNNNSDYSWTGATKYHLNGRDSLVNPGPAMASHKDDEEKYFPQSGVLIFGKQDSGKTNVDIEKVMITDEEEIRTTNPVATEQYGSVSTYLQSGNTQAATSDVNTQGVLPGMVWQDRDVYLRGPIWAKIPHTDGHFHPSPLMGGFGLKHPPPQILIKNTPVPANPSTTFSAAKFASFITQYSTGQVSVEIEWELQKENSKRWNPEIQYTSNYNKSVNVDFTVDTNGVYSEPRPIGTRYLTRNL

SEQ ID NO: 82 - protein, 735 aa, Adeno-associated virus
MAADGYLPDWLEDTLSEGIRQWWKLKPGPPPPKPAERHKDGSRGLVLPGYKYLGPFNGLDKGEPVNEADAAALEHDKAYDRQLNSGDNPYLKYNHADAEFQERLKEDTSFGGNLGRAVFQAKKRVLEPLGLVEEPVKTAPGKKRPVEHSPAEPDSSSGTGKAGQQPARKRLNFGQTGDADSVPDPQPLGQPPAAPSGLGSTTMATGSGAPMADNNEGADGVGNSSGNWHCDSQWLGDRVITTSTRTWALPTYNNHLYKQISSQSGASNDNHYFGYSTPWGYFDFNRFHCHFSPRDWQRLINNNWGFRPKRLNFKLFNIQVKEVTQNDGTTTIANNLTSTVQVFTDSEYQLPYVLGSAHQGCLPPFPADVFMVPQYGYLTLNNGSQAVGRSPFYCLEYFPSQMLRTGNNFQFSYTFEDVPFHSSYAHSQSLDRLMNPLIDQYLYYLNKTQTNSGTLQQSRLLFSQAGPTNMSLQAKNWLPGPCYRQQRLSKQANDNNNSNFPWTAATKYHLNGRDSLVNPGPAMASHKDDEEKFFPMHGTLIFGKQGTNANDADLENVMITDEEEIRTTNPVATEQYGTVSNNLQNSNTGPTTGTVNHQGALPGMVWQDRDVYLQGPIWAKIPHTDGHFHPSPLMGGFGLKHPPPQIMIKNTPVPANPPTNFSSAKFASFITQYSTGQVSVEIEWELQKENSKRWNPEIQYTSNYNKSVNVDFTVDNNGVYSEPRPIGTRYLTRNL

SEQ ID NO: 83 - protein, 735 aa, Adeno-associated virus
MAADGYLPDWLEDTLSEGIRQWWKLKPGPPPPKPAERHKDDSRGLVLPGYKYLGPFNGLDKGEPVNEADAAALEHDKAYDRQLDSGDNPYLKYNHADAEFQERLKEDTSFGGNLGRAVFQAKKRILEPLGLVEEPVKTAPGKKRPVEHSPAEPDSSSGTGKAGQQPARKRLNFGQTGDADSVPDPQPLGQPPAAPSGLGTNTMASGSGAPMADNNEGADGVGNSSGNWHCDSTWMGDRVITTSTRTWALPTYNNHLYKQISSQSGASNDNHYFGYSTPWGYFDFNRFHCHFSPRDWQRLINNNWGFRPKRLSFKLFNIQVKEVTQNDGTTTIANNLTSTVQVFTDSGYQLPYVLGSAHQGCLPPFPADVFMVPQYGYLTLNNGSQAVGRSSFYCLEYFPSQMLRTGNNFTFSYTFEDVPFHSSYAHGQSLDRLMNPLIDQYLYYLSRTNTPSGTTTMSRLQFSQAGASDVRDQSRNWLPGPCYRQQRVSKTAADNNNSDYSWTGATKYHLNGRDSLVNPGPAMASHKDDEEKYFPQSGVLVFGKQDSGKTNVDIEKVMITDEEEIRTTNPAATEQYGSVSTNLQSGNTQAATSDVNTQGVLPGMVWQDRDVYLQGPIWAKIPHTDGHFHPSPLMGGFGLKHPPPQILIKNTPVPANPSTTFSAAKFVSFITQYSTGQVSVEIEWELQKENSKRWNPEIQYTSNYNKSVNVDFTVDTNGVYSEPRPIGTRYLTRNL

SEQ ID NO: 84 - protein, 735 aa, Adeno-associated virus
MAADGYLPDWLEDTLSEGIRQWWKLKPGPPPPKPAERHKDDSRGLVLPGYKYLGPFNGLDKGEPVNEADAAALEHDKAYDRQLDSGDNPYLKYNHADAEFQERLKEDTSFGGNLGRAVFQAKKRVLEPLSLVEEPVKTAPGKKRPVEHSPAEPDSSSGTGKSGNQPARKRLNFGQTGDSDSVPDPQPLGQPPAAPSGLGTNTMATGSGAPMADNNEGADGVGNSSGNWHCDSTWMGDRVITTSTRTWALPTYNNHLYKQISSQSGASNDNHYFGYSTPWGYFDFNRFHCHFSPRDWQRLINNNWGFRPKRLNFKLFNIQVKEVTQNDGTTTIANNLTSTVQVFTDSEYQLPYVLGSAHQGCLPPFPADVFMVPQYGYLTLNNGSQAVGRSSFYCLEYFPSQMLRTGNNFTFSYTFEDVPFHSSYAHSQSLDRLMNPLIDQYLYYLSRTNTPSGTTTQSRLQFSQAGASDIQDQSRNWLPGPCYRQQRVSKTSADNNNSEYSWTGATKYHLNGRDSLVNPGPAMASHKDDEEKFFPQSGVLIFGKQGSEKTNVDIEKVMITDEEEIRTTNPVATEQYGSVSTNLQSGNTQAATADVNTQGVLPGMVGQDRDVYLQGPTWAKIPHTDGHFHPSPLMGGFGLKHPPPQILIKNTPVPANPSTTFSAAKFASFITQYSTGQVSVEIEWELQKENSKRWNPEIQYTSNYNKSVNVDFTVDTNGVYSEPRPIGTRYLTRNL

SEQ ID NO: 85 - protein, 735 aa, Adeno-associated virus
MAADGYLPDWLEDTLSEGIRQWWKLKPGPPPPKPAERHKDDSRGLVLPGYKYLGPFNGLDKGEPVNEADAAALEHDKAYDRQLDSGDNPYLKYNHADAEFQERLKEDTSFGGNLGRAVFQAKKRVLEPLGLVEEPVKTAPGKKRPVEHSPAEPDSSSGTGKSGNQPARKRLNFGQTGDSDSVPDPQPLGQPPAAPSGLGTNTMATGSGAPMADNNEGADGVGNSSGNWHCDSTWMGDRVITTSTRTWALPTYNNHLYKQISSQSGASNDNHYFGYSTPWGYFDFNRFHCHFSPRDWQRLINNNWGFRPKRLNFKLFNIQVKEVTQNDGTTTIANNLTSTVQVFTDSEYQLPYVLGSAHQGCLPPFPADVFMVPQYGYLTLNNGSQAVGRSSFYCLGYFPSQMLRTGNNFTFSYTFEDVPFHSSYAHSQSLDRLMNPLIDQYLYYLSRTNTPSGTTTQSRLQFSQAGASDIRDQSRNWLPGPCYRQQRVSKTSADNNNSEYSWTGATKYHLNGRDSLVNPGPAMASHKDDEEKFFPQSGVLIFGKQGPEKTNVDIEKVMITDEEEIRTTNPVATEQYGSVSTNLQSGNTQAATADVNTQGVLPGMVWQDRDVYLQGPIWAKIPHTDGHFHPSPLMGGFGLKHPPPQILIKNTPVPANPSTTFSAAKFASFITQYSTGQVSVEIEWELQKENSKRWNPEIQYTSNYNKSVNVDFTVDTNGVYSEPRPIGTRYLTRNL

SEQ ID NO: 86 - protein, 736 aa, Adeno-associated virus
MAADGYLPDWLEDTLSEGIRQWWKLKPGPPPPKPAERHKDDSRGLVLPGYKYLGPGNGLDKGEPVNAADAAALEHDKAYDQQLKAGDNPYLKYNHADAEFQERLKEDTSFGGNLGRAVFQAKKRLLEPLGLVEEAAKTAPGKKRPVEQSPQEPDSSAGIGKSGSQPAKKKLNFGQTGDTESVPDPQPIGEPPAAPSGVGSLTMASGGGAPVADNNEGADGVGSSSGNWHCDSQWLGDRVITTSTRTWALPTYNNHLYKQISNSTSGGSSNDNAYFGYSTPWGYFDFNRFHCHFSPRDWQRLINNNWGFRPKRLNFKLFNIQVKEVTDNNGVKTIANNLTSTVQVFTDSDYQLPYVLGSAHEGCLPPFPADVFMIPQYGYLTLNDGGQAVGRSSFYCLEYFPSQMLRTGNNFQFSYEFENVPFHSSYAHSQSLDRLMNPLIDQYLYYLSKTINGSGQNQQTLKFSVAGPSNMAVQGRNYIPGPSYRQQRVSTTVTQNNNSEFAWPGASSWALNGRNSLMNPGPAMASHKEGEDRFFPLSGSLIFGKQGTGRDNVDADKVMITNEEEIKTTNPVATESYGQVATNHQSAQAQAQTGWVQNQGILPGMVWQDRDVYLQGPIWAKIPHTDGNFHPSPLMGGFGMKHPPPQILIKNTPVPADPPTAFNKDKLNSFITQYSTGQVSVEIEWELQKENSKRWNPEIQYTSNYYKSNNVEFAVSTEGVYSEPRPIGTRYLTRNL

SEQ ID NO: 87 - protein, 736 aa, Adeno-associated virus
MAADGYLPDWLEDTLSEGIRQWWKLKPGPPPPKPAERHKDDSRGLVLPGYKYLGPGNGLDKGEPVNAADAAALEHDKAYDQQLKAGDNPYLKYNHADAEFQERLKEDTSFGGNLGRAVFQAKKRLLEPLGLVEEAAKTAPGKKRPVEQSPQEPDSSAGIGKSGSQPAKKKLNFGQTGDTESVPDPQPIGEPPAAPSGVGSLTMASGGGAPVADNNEGADGVGSSSGNWHCDSQWLGDRVITTSTRTWALPTYNNHLYKQISNSTSGGSSNDNAYFGYSTPWGYFDFNRFHCHFSPRDWQRLINNNWGFRPKRLNFKLFNIQVKEVTDNNGVKTIANNLTSTVQVFTDSDYQLPYVLGSAHEGCLPPFPADVFMIPQYGYLTLNDGSQAVGRSSFYCLEYFPSQMLRTGNNFQFSYEFENVPFHSSYAHSQSLDRLMNPLIDQYLYYLSKTINGSGQNQQTLKFSVAGPSNMAVQGRNYIPGPSYRQQRVSTTVTQNNNSEFAWPGASSWALNGRNSLMNPGPAMASHKEGEDRFFPLSGSLIFGKQGTGRDNVDADKVMITNEEEIKTTNPVATESYGQVATNHQSAQAQAQTGWVQNQGILPGMVWQDRDVYLQGPIWAKIPHTDGNFHPSPLMGGFGMKHPPPQILIKNTPVPADPPTAFNKDKLNSFITQYSTGQVSVEIEWELQKENSKRWNPEIQYTSNYYKSNNVEFAVNTEGVYSEPRPIGTRYLTRNL

SEQ ID NO: 88 - protein, 735 aa, Adeno-associated virus
MAADGYLPDWLEDTLSEGIRQRWKLKPGPPPPEPAERHKDDSRGLVLPGYKYLGPFNGLDKGEPVNEADAAALEHDKAYDRQLDSGDNPYLKYNHADAEFQERLKEDTSFGGNLGRAVFQAKKRVLEPLGLVEEPVKTAPGKKRPVEHSPVEPDSSSGTGKAGQQPARKRLNFGQTGDADSVPDPQPLGQPPAAPSGLGTNTMATGSGAPMADNNEGADGVGNSSGNWHCDSTWMGDRVITTSTRTWALPTYNNHLYKQISSQSGASNDNHYFGYSTPWGYFDFNRFHCHFSPRDWQRLINNNWGFRPKRLNFKLFNIQVKEVTQNDGTTTIANNLTSTVQVFTDSEYQLPYVLGSAHQGCLPPFPADVFMVPQYGYLTLNNESQAVGRSSFYCLEYFPSQMLRTGNNFTFSYTFEDVPFHSSYAHSQSLGRLMNPLIDQYLYYLSRTNTPSGTTTQSRLQFSQAGASDIRDQSRNWLPGPCYRQQRVSKTSADNNNSEYSWTGATKYHLNGRDSLVNPGPAMASHKDDEEKFFPQSGVLIFGKQGSEKTNVDIEKVMITDEEEIRTTNPVATEQYGSVSTNLQRGNRQAATADVNTQGVLPGMVWQDRDVYLQGPIWAKIPHTDGHFHPSPLMGGFGLKHPPPQILIKNTPVPANPSTTFSAAKFASFITQYSTGQVSVEIEWELQKENSKRWNPEIQYTSNYNKSVNVDFTVDTNGVYSEPRPIGTRYLTRNL

SEQ ID NO: 89 - protein, 738 aa, Adeno-associated virus
MAADGYLPDWLEDNLSEGIREWWDLKPGAPKPKANQQKQDDGRGLVLPGYKYLGPFNGLDKGEPVNAADAAALEHDKAYDQQLKAGDNPYLRYNHADAEFQERLQEDTSFGGNLGRAVFQAKKRVLEPLGLVEEAAKTAPGKKRPVEPSPQRSPDSSTGIGKKGQQPAKKRLNFGQTGDSESVPDPQPIGEPPAGPSGLGSGTMAAGGGAPMADNNEGADGVGSSSGNWHCDSTWLGDRVITTSTRTWALPTYNNHLYKQISNGTSGGSTNDNTYFGYSTPWGYFDFNRFHCHFSPRDWQRLINNNWGFRPKRLSFKLFNIQVKEVTQNEGTKTIANNLTSTIQVFTDSEYQLPYVLGSAHQGCLPPFPADVFMIPQYGYLTLNNGSQAVGRSSFYCLEYFPSQMLRTGNNFEFSYTFEDVPFHSSYAHSQSLDRLMNPLIDQYLYYLSRTQSTGGTQGTQQLLFSQAGPANMSAQAKNWLPGPCYRQQRVSTTLSQNNNSNFAWTGATKYHLNGRDSLVNPGVAMATHKDDEERFFPSSGVLMFGKQGAGRDNVDYSSVMLTSEEEIKTTNPVATEQYGVVADNLQQTNTGPIVGNVNSQGALPGMVWQNRDVYLQGPIWAKIPHTDGNFHPSPLMGGFGLKHPPPQILIKNTPVPADPPTTFSQAKLASFITQYSTGQVSVEIEWELQKENSKRWNPEIQYTSNYYKSTNVDFAVNTEGTYSEPRPIGTRYLTRNL

SEQ ID NO: 90 - protein, 738 aa, Adeno-associated virus
MAADGYLPDWLEDNLSEGIREWWDLKPGAPKPKANQQKQDDGRGLVLPGYKYLGPFNGLDKGEPVNAADAAALEHDKAYDQQLKAGDNPYLRYNHADAEFQERLQEDTSFGGNLGRAVFQAKKRVLEPLGLVEEGAKTAPGKKRPVEPSPQRSPDSSTGIGKKGQQPARKRLNFGRTGDSESVPDPQPIGEPPAAPSSVGSGTMAAGGGAPMADNNEGADGVGSSSGNWHCDSTWLGDRVITTSTRTWALPTYNNHLYKQISNGTSGGSTNDNTYFGYSTPWGYLDFNRFHCHFSPRDWQRLINNNWGFRPKRLSFKLFNIQVKEVTQNEGTKTIANNLASTIQVFTDSEYQPPYVLGSAHQGCLPPFPADVFMIPQYGYLTLNNGSQAVGRSSFYCLEYFPSQMLRTGNNFSFSYTFEDVPFHSSYAHSQSLDRLMNPLIDQYLYYLSRTQSTGGTAGTQQLLFSRAGPSNMSAQARNWLPGPCYRQQRVSTTLSQNNNSNFAWTGATKYHLNGRDSLVNPGVAMATNKDDEDRFFPSSGILMFGKQGAGKDNVDYSNVMLTSEEEIKTTNPVATEQYGVVADNLQQQNTAPTVGAVNSQGALPGMVWQNRDVYLQGPIWAKIPHTDGNFHPSPLMGGFGLKHPPPQILIKNTPVPADPPTAFNQAKLNSFIAQYSTGQVSVEIEWELQKENSKRWNPEIQYTSNYYKSTNADFAVNTEGVYSEPRPIGTRYLTRNL

SEQ ID NO: 91 - protein, 738 aa, Adeno-associated virus
MAADGYLPDWLEDNLSEGIREWWDLKPGAPKPKANQQKQDDGRGLVLPGYKYLGPFNGLDKGEPVNAADAAALEHDKAYDQQLKAGDNPYLRYNHADAEFQERLQEDTSFGGNLGRAVFQAKKRVLEPLGPVEEAAKTAPGKKRPVEPPPQRSPDSSTGIGKKGQQPAKKRLNFGQTGDSESVPDPQPIGEPPAGPSGLGSGTMAAGGGAPMADNNEGADGVGSSSGNWHCDSTWLGDRVITTSTRTWALPTYNNHLYKQISNGTSGGSTNDNTYFGYSTPWGYFDFNRFHCHFSPRDWQRLINNNWGFRPKRLSFKLFNIQVKEVTQNEGTKTVANNLTSTIQVFTDSEYQLPYVLGSAHQGCLPPFPADVFMIPQYGYLTLNNGSQAVGRSSFYCLEYFPSQMLRTGNNFEFSYTFEDVPFHSSYAHSQSLDRLMNPLIDQYLYYLSRTQSTGGTQGTQQLLFSQAGPANMSAQAKNWLPGPCYRQQRVSTTLSQNNNSNFAWTGATKYHLNGRDSLVNPGVAMATHKDDEERFFPSSGVLMFGKQGAGRDNVDYSSVMLTSEEEIKTTNPVATEQYGVVADNLQQTNTGPIVGNVNSQGALPGMVWQNRDVYLQGPIWAKIPHTDGNFHPSPLMGGFGLKHPPPQILIKNTPVPADPPTTFSQAKLASFITQYSTGQVSVEIEWELQKENSKRWNPEIQYTSNYYKSTNVDFAVNTEGTYSEPRPIGTRYLTRNL

SEQ ID NO: 92 - protein, 738 aa, Adeno-associated virus
MAADGYLPDWLEDNLSEGIREWWDLKPGAPKPKANQQKQDDGRGLVLPGYKYLGPFNGLDKGEPVNAADAAALEHDKAYDQQLKAGDNPYLRYNHADAEFQERLQEDTSFGGNLGRAVFQAKKRVLEPLGLVEEAAKTAPGKKRPVEPSPQRSPDSSTGIGKKGQQPAKKRLNFGQTGDSESVPDPQPIGEPPAGPSGLGSGTMAAGGGAPMADNNEGADGVGSSSGNWHCDSTWLGDRVITTSTRTWALPTYNNHLYKQISNGTSGGSTNDNTYFGYSTPWGYFDFNRFHCHFSPRDWQRLINNNWGFRPKRLSFKLFNIQVKEVTQNEGTKTIANNLTSTIQVFTDSEYQLPYVLGSAHQGCLPPFPADVFMIPQYGYLTLNNGSQAVGRSSFYCLEYFPSQMLRTGNNFEFSYTFEDVPFHSSYAHSQSLDRLMNPLIDQYLYYLSRTQSTGGTQGTQQLLFSQAGPANMSAQAKNWLPGPCYRQQRVSTTLSQSNNSNFAWTGATKYHLNGRDSLVNPGVAMATHKDDEERFFPSSGVLMFGKQGAGRDNVDYSSVMLTSEEEIKTTNPVATEQYGVVADNLQQTNTGPIVGNVNSQGALPGMVWQNRDVYLQGPIWAKIPHTDGNFHPSPLMGGLGLKHPPPQILIKNTPVPADPPTTFSQAKLASFITQYSTGQVSVEIEWELQKENSKRWNPEIQYTSNYYKSTNVDFAVNTEGTYSEPRPIGTRYLTRNL

SEQ ID NO: 93 - protein, 737 aa, Adeno-associated virus
MAADGYLPDWLEDNLSEGIREWWDLKPGAPKPKANQQKQDDGRGLVLPGYKYLGPFNGLDKGEPVNAADAAALEHDKAYDQQLKAGDNPYPRYNHADAEFQERLQEDTPFGGNLGRAVFQAKKRVLEPLGLVEEAAKTAPGKKRPVEPSPQRSPDSSTGIGKKGQQPAKKRLNFGQTGDSESVPDPQPIGEPPAGPSGLGSGTMAAGGGAPMADNNEGADGVGNASGNWHCDSTWLGDRVITTSTRTWALPTYNNHLYKQISSASTGASNDNHYFGYSTPWGYFDFNRFHCHFSPRDWQRLINNNWGFRPKRLNFKLFNIQVKEVTTNDGVTTIANNLTSTVQVFSDSEYQLPYVLGSAHQGCLPPFPADVFMIPQYGYLTLNNGSQAVGRSSFYCLEYFPSQMLRTGNNFTFSYTFEEVPLHSSYAHSQSLDRLMNPLIVQYLYYLNRTQNQSGSAQNKDLLFSRGSPAGMSVQPKNWLPGPCYRQQRVSKTKTDNNNSNFTWTGASKYNLNGRESIINPGTAMASHKDDEDKFFPMSGVMIFGKESAGASNTALDNVMITDEEEIKATNPVATERFGTVAVNFQSSSTDPATGDVHAMGALPGMVWQDRDVYLQGPIWAKIPHTDGHFHPSPLMGGFGLKNPPPQILIKNTPVPANPPAEFSATKFASFITQYSTGQVSVEIEWELQKENSKRWNPEVQYTSNYAKSASVDFTVDNNGLYTEPRPIGTRYLTRPL

SEQ ID NO: 94 - protein, 736 aa, Adeno-associated virus
MAADGYLPDWLEDTLSEGIRQWWKLRPGPPPPKPAERHKDDSRGLVLPGYKYLGPFNGLDKGEPVNEADAAALEHDKAYDRQLDSGDNPYLKYNHADAEFQERLKEDTSFGGNLGRAVFQAKKRVLEPLGLVEEGAETAPGKKRPVEQSPQGPDSSSGIGKTGQQPAKKRLNFGQTGDSESVPDPQPLGEPPATPAAVGPTTMASGGGAPMADNNEGADGVGNASGNWHCDSTWLGDRVITTSTRTWALPTYNNHLYKQISSASTGASNDNHYFGYSTPWGYFDFNRFHCHFSPRDWQRLINNNWGFRPKRLNFKLFNIQVKEVTTNDGVTTIANNLTSTVQVFSDSEYQLPYVLGSAHQGCLPPFPADVFMIPQYGYLTLNNGSQAVGRSSFYCLEYFPSQMLRTGNNFTFSYTFEEVPFHSSYAHSQSLDRLMNPLIDQYLYYPNRTQNQSGSAQNKDLLFSRGSPAGMSVQPKNWLPGPCYRQQRVSKTKTDNNNSNFTWTGASKYNLNGRESIINPGTAMASHKDDEDKFFPMSGVMIFGKESAGASNTALDNVMITDEEEIKATNPVATERFGTVAVNFQSSSTDPATGDVHAMGALPGMVWQGRDVYLQGPIWAKIPHTDGHFHPSPLMGGFGLKNPPPQILIKNTPVPANPPAEFSATKFASFITQYSTGQVSVEIEWELQKENSKRWNPEVQYTSNYAKSANVDFTVDNNGLYTEPRPIGTRYLTRPL

SEQ ID NO: 95 - protein, 735 aa, Adeno-associated virus
MAADGYLPDWLEDTLSEGIRQWWKLKPGPPPPKPAERHRDDSRGLVLPGYKYLGPFNGLDKGEPVNEADAAALEHDKAYDRQLDSGDNPYLKYNHADAEFQERLKEDTSFGGNLGRAVFQAKKRVLEPLGLVEEPVKTAPGKKRPVEHSPVEPDSSSGTGKAGQQPARKRLNFGQTGDADSVPDPQPLGQPPAAPSGLGTNTMATGSGAPMADNNEGADGVGNSSGNWHCDSTWMGDRVITTSTRTWALPTYNNHLYKQISSQSGASNDNHYFGYSTPWGYFDFNRFHCHFSPRDWQRLINNNWGFRPKRLNFKLFNIQVKEVTQNDGTTTIANNLTSTVQVFTDSGYQLPYVLGSAHQGCLPPFPADVFMVPQYGYPTLNNGSQAVGRSSFYCLEYFPSQMLRTGNNFTFSYTFEDVPFHSSYAHSQSLDRLMNPLIDQYLYYLSTTNTPSGTTTQSRLQFSQAGASDIRDQSRNWLPGPCYRQQRVSKTSADNNNSEYSWTGATKYHLNGRDSLVNPGPAVASHKDDEEKFFPQSGVLIFGKQGSEKTNVDIEKVMITDEEEIRTTNPVATEQYGSVSTNLQRGNRQAATADVNTQGVLPGMVWQDRDVYLQGPIWAKIPHTDGHFHPSPLMGGFGLKHPPPQILIKNTPVPANPSTTFSAAKFASFITQYSTGQVSVEIEWELQKENSKRWNPEIQYTSNYNKSVNVDFTVDTNGVYSEPRPIGTRYLTRNL

SEQ ID NO: 96 - protein, 736 aa, Adeno-associated virus
MAADGYLPDWLEDTLSEGIRQWWKLKPGPPPPKPAERHKDDSRGLVLPGYKYLGPFNGLDKGEPVNEADAAALEHDKAYDRQLDSGDNPYLKYNHADAEFQERLKEDTSFGGNLGRAVFQAKKRVLEPLGLVEEGAKTAPGKKRPVEQSPQEPDSPSGIGKTGQQPAKKRLNFGQTGDSESVPDPQPLGEPPATPAAVGPTTMASGGGAPMADNNEGADGVGNASGNWHCDSTWLGDRVITTSTRTWALPTYNNHLYKQISSASTGASNDNHYFGYSTPWGYFDFNRFHCHFSPRDWQRLINNNWGFRPKRLNFKLFNIQVKEVTTNDGVTTIANNLTSTVQVFSDSEYQLPYVLGSAHQGRLPPFPADVFMIPQYGYLTLNNGSQAVGRSSSYCLEYFPSQMLRTGNNFTFSYTFEEVPLHSSCAHSQSLDRLMNPLIDQYLYYLNRTQNQSGSAQNRDLLFSRGSPAGMSVQPKNWLPGPCYRQQRVSKTKTDNNNSNFTWTGASKYNLNGRESIINPGTAMASHKDDEDKFFPMSGVMIFGKESAGASNTALDNVMITDEEEIKATNPVATERFGTVAVNFQSSSTDPATGDVHAMGALPGMVWQDRDVYLQGPIWAKIPHTDGHFHPSPLMGGFGLKNPPPQILIKNTPVPANPPAEFSATKFASFITQYSAGQVSVEIEWELQKENSKRWNPEVQYTSNYAKSANVDFTVDNNGLYTEPRPIGTRYLTRPL

SEQ ID NO: 97 - protein, 735 aa, Adeno-associated virus
MAADGYLPDWLEDTLSEGIRQWWKLKPGPPPPKPAERHRDDSRGLVLPGYKYLGPFNGLDKGEPVNEADAAALEHDKAYDRQLDSGDNPYLKYNHADAEFQERLKEDTSFGGNLGRAVFQAKKRVLEPLGLVGEPVKTAPGKKRPVEHSPVEPDSSSGTGKAGQQPARKRLNFGQTGDADSVPDPQPLGQPPAAPSGLGTNTMATGSGAPMADNNEGADGVGNSSGNWHCDSTWMGDRVITTSTRTWALPTYNNHLYKQISSQSGASNDSHYFGYSTPWGYFDFNRFHCHFSPRDWQRLINNNWGFRPKRLNFKLFNIQVKEVTQNDGTTTIANNLTSTVQVFTDSEYQLPYVLGSAHQGCLPPFPADVFMVPQYGYLTLNNGSQAVGRSSFYCLEYFPSQMLRTGNNFTFSYTFEDVPFHSSYAHSQSLDRLMNPLIDQYLYYLSTTNTPSGTTTQSRLQFSQAGASDIRDQSRNWLPGPCYRQQRVSKTSADNNNSEYSWTGATKYHLNGRDSLVNPGPAMASHKDNEEKFFPQSGVLIFGKQGSEKTNVDIEKVMITDEEEIRTTNPVATEQYGSVSTNLQRGNRQAATADVNTQGVLPGMVWQDRDVYLQGPIWAKIPHTDGHFHPSPLMGGFGLKHPPPQILIKNTPVPANPSTTFSAAKFASFITQYSTGQVSVEIEWELQKENSKRWNPEIQYTSNYNKSVNVDFTVDTNGVYSEPRPIGTRYLTRNL

SEQ ID NO: 98 - protein, 736 aa, Adeno-associated virus
MAADGYLPDWLEDNLSEGIREWWDLKPGAPKPKANQQKQDDGRGLVLPGYKYLGPFNGLDKGEPVNAADAAALEHDKAYDQQLKAGDNPYLRYNHADAEFQERLQEDTSFGGNLGRAVFQAKKRVLEPLGLVEEGAKTAPGKKRPVEQSPQEPDSSSGIGKTGQQPAKKRLNFGQTGDSESVPDPQPLGEPPATPAAVGPTTMASGGGAPMADNNEGADGVGNASGNWHCDSTWLGDRVITTSTRTWALPTYNNHLYKQISSTSTGASNDNHYFGYGTPWGYFDFNRFHCHFSPRDWQRLINNNWGFRPKRLNFKLFNIQVEEVTTNDGVTTIANNLTSTVQVFSDSEYQLPYVLGSAHQGCLPPFPADVFMIPQYGYLTLNNGSQAVGRSSFYCLEYFPSQMLRTGNNFTFSYTFEEVPFHSSYAHSQSLDRLMNPLIDQYLYYLNRTQNQSGSAQNKDLLFSRGSPAGMSVQPKNWLPGPCYRQQRVSKTKTDNNNSNFTWTGASKYNLNGRESIINPGTAVASHKDDEDKFFPMSGVMIFGKESAGASSTALDNVMITDEEEIKATNPVATERFGTVAVNFQSSSTDPATGDVHAMGALPGMVWQDRDVYLQGPIWAKIPHTDGHFHPSPLMGGFGLKNPPPQILIKNTPVPANPPAEFSATKFASFITQYSTGQVSVEIEWELQKENSKRWNPEVQYTSNYAKSANVDFTVDNNGLYTEPRPIGTRYLTRPL

SEQ ID NO: 99 - protein, 735 aa, Adeno-associated virus
MAADGYLPDWLEDTLSEGIRQWWKLKPGPPPPKPAERHKDDSRGLVLPGYKYLGPFNGLDKGEPVNEADAAALEHDKAYDRQLDSGDNPYLKYNHADAEFQERLKEDTSFGGNLGRAVFQAKKRVLEPLGLVGEPVKTAPGKKRPVEHSPVEPDSSSGTGKAGQQPARKRLNFGQTGDADSVPDPQPLGQPPAAPSGLGTNTMATGSGAPMADNNEGADGVGNSSGNWHCDSTWMGDRVITTSTRTWALPTYNNHLYKQISSQSGASNDNHYFGYSTPWGYFDFNRFHCHFSPRDWQRLINNNWGFRPKRLNFKLFNIQVKEVTQNDGTTTIANNLTSTVQVFTDSEYQLPYVLGSAHQGCLPPFPADVFMVPQYGYLTLNNGSQAVGRSSFYCLEYFPSQMLRTGNNFTFSYTFEDVPFHSGYAHSQSLDRLMNPLIDQYLYYLSTTNTPSGTTTQSRLQFSQAGASDIRDQSRNWLPGPCYRQQRVSKTSADNNNSEYSWTGATKYHLNGRDSLVNPGPAMASHKDNEEKFFPQSGVLIFGKQGSEKTNVDIEKVMITDEEEIRTTNPVATEQYGSVSTNLQRGNRQAATADVNTQGVLPGMVWQDRDVYLQGPIWAKIPHTDGHFHPSPLMGGFGLKHPPPQILIKNTPVPANPSTTFSAAKFASFITQYSTGQVSVEIEWELQKENSKRWNPEIQYTSNYNKSVNVDFTVDTNGVYSEPRPIGTRYLTRNL

SEQ ID NO: 100 - protein, 735 aa, Adeno-associated virus
MAADGYLPDWLEDTLSEGIRQWWKLKPGPPPPKPAERHKDDSRGLVLPGYKYLGPFNGLDKGEPVNEADAAALEHDKAYDRQLDSGDNPYLKYNHADAEFQERLKEDTSFGGNLGRAVFQAKKRVLEPLGLVGEPVKTAPGKKRPVEHSPVEPDSSSGTGKAGQQPARKRLNFGQTGDADSVPDPQPLGQPPAAPSGLGTNTMATGSGAPMADNNEGADGVGNSSGNRHCDSTWMGDRVITTSTRTWALPTYNNHLYRQISSQSGASNDNHYFGYSTPWGYFDFNRFHCHFSPRDWQRLINNNWGFRPKRLNFKLFNIQVKEVTQNDGTTTIANNLTSTVQVFTDSEYQLPYVLGSAHQGCLPPFPADVFMVPQYGYLTLSNGSQAVGRSSFYCPEYFPSQMLRTGNNFTFSYTFEDVPFHSSYAHSQSLDRLMNPLIDQYLYYLSTTNTPSGTTTQSRLQFSQAGASDIRDQSRNWLPGPCYRQQRVSKTSADNNNSEYSWTGATKYHLNGRDSLVNPGPAMASHKDNEEKFFPQSGVLIFGKQGSEKTNVDIEKVMITDEEEIRTTNPVATEQYGSVSTNLQRGNRQAATADVNTQGVLPGMVWQDRDVYLQGPIWAKIPHTDGHFHPSPLMGGFGPKHPPPQILIKNTPVPANPSTTFSAAKFASFITQYSTGQVSVEIEWELQKENSKRWNPEIQYTSNYNKSVNVDFTVDTNGVYSEPRPIGTRYLTRNL

SEQ ID NO: 101 - protein, 734 aa, Adeno-associated virus
MAADGYLPDWLEDTLSEGIRQWWKLKPGPPPPKPAERHKDDSRGLVLPGYKYLGPFNGLDKGEPVNEADAAALEHDKAYDRQLDSGDNPYLKYNHADAEFQERLKEDTSFGGNLGRAVFQAKKRVLEPLGLVEEPVKTAPGKKRPVEHSPAEPDSSSGTGKAGQQPARKRLNFGQTGDADSVPDPQPLRQPPAAPTSLGSTTMATGSGAPMADNNEGADGVGNSSGNWHCDSQWLGDRVITTSTRTWALPTYNNHLYKQISSQSGASNDNHYFGYSTPWGYFDFNRFHCHFSPRDWQRLINNNWGFRPKRLNFKLFNIQVKEVTQNDGTTTIANNLTSTVQVFTDSEYQLPYVLGSAHQGCLPPFPADVFMVPQYGYLTLNNGSQAVGRSSFYCLEYFPSQMLRTGNNFQFSYTFEDVPFHSSYAHSQSLDRLMNPLIDQYLYYLNRTQTASGTQQSRLLFSQAGPTSMSLQAKNWLPGPCYRQQRLSKQANDNNNSNFPWTGATKYYLNGRDSLVNPGPAMASHKDDEEKFFPMHGTLIFGKEGTNATNAELENVMITDEEEIRTTNPVATEQYGYVSNNLQNSNTAASTETVNHQGALPGMVWQDRDVYLQGPIWAKIPHTDGHFHPSPLMGGFGLKHPPPQIMIKNTPVPANPPTNFSSAKFASFITQYSTGQVSVEIEWELQKENSKRWNPEIQYTSNYNKSVNVDFTVDTNGVYSEPRPIGTRYLTRNL

SEQ ID NO: 102 - protein, 734 aa, Adeno-associated virus
MAADGYLPDWLEDTLSEGIRQWWKLKPGPPPPKPAERHKDDSRGLVLPGYKYLGPFNGLDKGEPVNEADAAALEHDKAYDRQLDSGDNPYLKYNHADAEFQERLKEDTSFGGNLGRAVFQAKKRVLEPLGLVEEPVKTAPGKKRPVEHSPAEPDSSSGTGKAGQQPARKRLNFGQTGDADSVPDPQPLGQPPAAPTSLGSTTMATGSGAPMADNNEGADGVGNSSGNWHCDSQWLGDRVITTSTRTWALPTYNNHLYKQISSQSGASNDNHYFGYSTPWGYFDFNRFHCRFSPRDWQRLINNNWGFRPKRLNFKLFNIQVKEVTQNDGTTTIANNLTSTVQVFTDSEYQLPYVLGSAHQGCLPPFPADVFMVPQYGYLTLNNGSQAVGRSSFYCLEYFPSQMLRTGNNFQFSYTFEDVPFHSSYAHSQGLDRLMNPLIDQYLYYLNRTQTASGTQQSRLLFSQAGPTSMSLQAKNWLPGPCYRQQRLSKQANDNNNSNFPWTGATKYHLNGGDSLVNPGPAMASHKDDEEKFFPMHGTLIFGKEGTNATNAELENVMITDEEEIRTTNPVATEQYGYVSNNLQNSNTAASTETVNHQGALPGMVWQDRDVYLRGPIWAKIPHADGHFHPSPLMGGFGLKHPPPQIMIKNTPVPANPPTNFSSAKFASFITQYSTGQVSVEIEWELQKENSKRWNPEIQYTSNYNKSVNVDFTVDTNGVYSEPRPIGTRYLTRNL

SEQ ID NO: 103 - protein, 734 aa, Adeno-associated virus
MAADGYLPDWLEDTLSEGIRQWWKLKPGPPPPKPAERHKDDSRGLVLPGYKYLGPFNGLDKGEPVNEADAAALEHDKAYDRQLDSGDNPYLKYNHADAEFQERLKEDTSFGGNLGRAVFQAKKRVLEPLGLVEEPVKTAPGKKRPVEHSPAEPDSSSGTGKAGQQPARKRLNFGQTGDADSVPDPQPLGQPPAAPTSLGSTTMATGSGAPMADNNEGADGVGNSSGNWHCDSQWLGDRVITTSTRTWALPTYNNHLYKQISSQSGASNDNHYFGYSTPWGYFDFNRFHCHFSPRDWQRLINNNWGFRPKRLNFKLFNIQVKEVTQNDGTTTIANNLTSTVQVFTDSEYQLPYVLGSAHQGCLPPFPADVFMVPQYGYLTLNNGSQAVGRSSFYCLECFPSQMLRTGNNFQFSYTFEDVPFHSSYAHSQSLDRLMNPLIDQYLYYLNRTQTASGTQQSRLLFSQAGPTSMSLQAKNWLPGPCYRQQRLSKQANDNNNSNFPWTGATKYHLNGRDSLVNPGPAMASHKDDEEKFFPMHGTLIFGKEGTNATNAELENVMITDEEEIRTTNPVATEQYGYVSNNLQNSNTAASTETVNHQGALPGMVWQDRDVYLQGPIWAKIPHTDGHFHPSPLMGGFGLKHPPPQIMIKNTPVPANPPTNFSSAKFASFITQYSTGQVSVEIEWELQKENSKRWNPEIQYTSNYNKSVNVDFTVDTNGVYSEPRPIGTRYLTRNL

SEQ ID NO: 104 - protein, 735 aa, Adeno-associated virus
MAADGYLPDWLEDTLSEGIRQWWKLKPGPPPPKPAERHKDDSRGLVLPGYKYLGPFNGLDKGEPVNEADAAALEHDKAYDRQLDSGDNPYLKYNHADAEFQERLKEDTSFGGNLGRAVFQAKKRVLEPLGLVEEPVKTAPGKKRPVEHSPVEPDSSSGTGKAGNQPARKRLNFGQTGDADSVPDPQPLGQPPASPSGLGTNTMATGSGAPMADNNEGADGVGNSSGNWHCDSTWMGDRVVTTSTRTWALPTYNNHLYKQISSQSGASNDNHYFGYSTPWGYFDFNRFHCHFSPRDWQRLINNNWGFRPKRLNFKLFNIQVKEVTQNDGTTTIANNLTSTVQVFTDLEYQLPYVLGSAHQGCLPPFPADVFMVPQYGYLTLNNGSQAVGRSSFYCLEYFPSQMLRTGNNFTFSYTFEDVPFHSSYAHSQSLDRLMNPLIDQYLYYLSRTNTPSGTTTQSRLQFSQAGASDIRDQSRNWLPGPCYRQQRVSKTAADNNNSEYSWTGATKYHLNGRDSLVNPGPAMASHKDDEEKFFPQSGVLIFGKQGSEKTNVDIEKVMITDEEEIRTTNPVATEQYGSVSTNLQSGNTQAATSDVNTQGVLPGMVWQDRDVYLQGPIWAKIPHTDGHFHPSPLMGGFGLKHPPPQILIKNTPVPANPSTTFSAAKFASFITQYSTGQVSVEIEWELQKENSKRWNPEIQYTSNYNKSVNVDFTVDTNGVYSEPRPIGTRYLTRNL

SEQ ID NO: 105 - protein, 734 aa, Adeno-associated virus
MAADGYLPDWLEDTLSEGIRQWWKLKPGPPPKPAERHKDDSRGLVLPGYKYLGPFNGLDKGEPVNEADAAALEHDKAYDRQLDSGDNPYLKYNHADAEFQERLKEDTSFGGNLGRAVFQAKKRVLEPLGLVEEPVKTAPGKKRPVEHSPVEPDSSSGTGKAGNQPARKRLNFGQTGDADSVPDPQPLGQPPAAPSGLGTNTMATGSGAPMADNNEGADGVGNSSGDWHCDSTWMGDRVITTSTRTWALPTYNNHLYKQISSQSGASNDNHYFGYSTPWGYFDFNRFHCHFSPRDWQRLINNNWGFRPKRLNLKLFNIQVKEVTQNDGTTTIANNLTSTVQVFTDLEYQLPYVLGSAHQGCLPPFPADVFMVPQYGYLTLNNGSQAVGRSSFYCLEYFPSQMLRTGNNFTFSYTFEDVPFHSSYAHSQSLDRLMNPLIDQYLYYLSRTNTPSGTTTQSRLQFSQAGASDIRDQSRNWLPGPCYRQQRVSKTAADNNNGEYSWTGATKYHLNGRDSLVNPGPAMASHKDDEEKFFPQSGVLIFGKQGSEKTNVDIEKVMITDEEEIRTTNPVATEQYGSVSTNLQSGNTRAATSDVNTQGVLPGMVWQDRDVYLQGPIWAKIPHTDGHFHPSPLMGGFGLKHPPPQILIKNTPVPANPSTTFSAAKFASFITQYSTGQVSVEIEWELQKENSKRWNPEIQYTSNYNKSVNVDFTVDTNGVYSEPRPIGTRYLTRNL

SEQ ID NO: 106 - protein, 735 aa, Adeno-associated virus
MAADGYLPDWLEDTLSEGIRQWWKLKPGPPPPKPAERHKDDSRGLVLPGYKYLGPFNGLDKGEPVNEADAAALEHDKAYDRQLDSGDNPYLKYNHADAEFQERLKEDTSFGGNLGRAVFQAKKRVLEPLGLVEEPVKTAPGKKRPVEHSPVEPDSSSGTGKAGQQPARKRLNFGQTGDADSVPDPQPLGQPPAAPSGLGSTTMATGSGAPMADNNEGADGVGNSSGNWHCDSQWLGDRVITTSTRTWALPTYNNHLYKQISSQSGASNDNHYFGYSTPWGYFDFNRFHCHFSPRDWQRLINNNWGFRPKRLNFKLFNIQVKEVTQNDGTTTIANNLTSTVQVFTDSEYQLPYVLGSAHQGCLPPFPADVFMVPQYGYLTLNNGSQAVGRSSFYCLEYFPSQMLRTGNNFQFSYTFEDVPFHSSYAHSQSLDRLMNPLVDQYLYYLNKTQTNSGTLQQSRLLFSQAGPTNMSLQAKNWLPGPCYRQQRLSKQANDNNNSNFPWTAATKYHLNGRDSLVNPGPAMASHKDDEEKFFPMHGTLIFGKQGTNANDADLENVMITDEEEIRTTNPVATEQYGTVSNNLQNSNTGPTTGTVNHQGALPGMVWQDRDVYLQGPIWAKIPHTDGHFHPSPLMGGFGLKHPPPQIMIKNTPVPANPPTNFSSAKFASFITQYSTGQVSVEIEWELQKENSKRWNPEIQYTSNYNKSVNVDFTVDTNGVYSEPRPIGTRYLTRNL

SEQ ID NO: 107 - protein, 735 aa, Adeno-associated virus
MAADGYLPDWLEDTLSEGIRQWWKLKPGPPPPKPAERHKDDSRGLVLPGYKYLGPFNGLDKGEPVNEADAAALEHDKAYDRQLDSGDNPYLKYNHADAEFQERLKEDTSFGGNLGRAVFQAKKRVLEPLGLVEEPVKTAPGKKRPVEHPPVEPDSSSGTGKAGQQPARKRLNFGQTGDADSVPDPQPLGQPPAAPSGLGSTTMATGSGAPMADNNEGADGVGNSSGNWHCDSQWLGDRVITTSTRTWALPTYNNHLYKQISSQSGASNDNHYFGYSTPWGYFDFNRFHCHFSPRDWQRLINNNWGFRPKRLNFKLFNIQVKEVTQNDGTTTIANNLTSTVQVFTDSEYQLPYVLGSAHQGCLPPFPADVFMVPQYGYLTLNNGSQAVGRSSFYCLEYFPSQMLRTGNNFQFSYTFEDVPFHSSYAHSQSLDRLMNPLIDQYLYYLNKTQTNSGTLQQSRLLFSQAGPTNMSLQAKNRLPGPCYRQQRLSKQANDNNNSNFPWTAATKYHLNGRDSLVNPGPAMASHKDDEEKFFPMHGTLIFGKQGTNANDADLENVMITDEEEIRTTNPVATEQYGTVSNNLQNSNTGPTTGTVNHQGALPGMVWQDRDVYLQGPIWAKIPHTDGHFHPSPLVGGFGLKHPPPQIMIKNTPVPANPPTNFSSAKFASFITQYSTGQVSVEIEWELQKENSKRWNPEIQYTSNYNKSVNVDFTVDTNGVYSEPRPIGTRYLTRNL

SEQ ID NO: 108 - protein, 735 aa, Adeno-associated virus
MAADGYLPDWLEDTLSEGIRQWWKLKPGPPPPKPAERHKDDSRGLVLPGYKYLGPFNGLDKGEPVNEADAAALEHDKAYDRQLDSGDNPYPKYNHADAEFQERLKEDTSFGGNLGRAVFQAKKRVLEPLGLVEEPVKTAPGKKRPVEHSPAEPDSSSGTGKAGQQPARKRLNFGQTGDADSVPDPQPLGQPPAAPSGLGTNTMATGSGAPMADNNEGADGVGNSSGNWHCDSTWMGDRVITTSTRTWALPTYNNHLYKQISSQSGASNDNHYFGYSTPWGYFDFNRFHCHFSPRDWQRLINNNWGFRPKRLNFKLFNIQVKEVTQNDGTTTIANNLTSTVQVFTDSEYQLPYVLGSAHQGCLPPFPADVFMVPQYGYLTLNNGSQAVGRSSFYCLEYFPSQMLRTGNNFTFSYTFEDVPFHSSYAHSQSLDRLMNPLIDQYLYYLSRTNTPSGTTTQSRLQFSQAGASDIRDQSRNWLPGPCYRQQRVSKTSADNNNSEYSWTGATKYHLNGRDSLVNPGPAMASHKDDEEKFFPQSGVLIFGKQDSGKTNVDIEKVMITDEEEIRTTNPVATEQYGSVSTNLQSGNTQAATSDVNTQGVLPGMVWQDRDVYLQGPIWAKIPHTDGHFHPSPLMGGFGLKHPPPQILIKNTPVPANPSTTFSAAKFASFITQYSTGQVSVEIEWELQKENSKRWNPEIQYTSNYNKSVNVDFTVDTNGVYSEPRPIGTRYLTRNL

SEQ ID NO: 109 - protein, 738 aa, Adeno-associated virus
MAADGYLPDWLEDNLSEGIREWWDLKPGAPKPKANQQKQDDGRGLVLPGYKYLGPFNGLDKGEPVNAADAAALEHDKAYDQQLKAGDNPYLRYNHADAEFQERLQEDTSFGGNLGRAVFQAKKRVLEPLGLVEEAAKTAPGKKRPVEPSPQRSPDSSAGIGKKGQQPAKKRLNFGQTGDSESVPDPQPIGEPPAGPSGLGSGTMAAGGGAPMADNNEGADGVGSSSGNWHCDSTWLGDRVITTSTRTWALPTYNNHLYKQISNGTSGGSTNDNTYFGYSTPWGYFDFNRFHCHFSPRDWQRLINNNWGFRPKRLSFKLFNIQVKEVTQNEGTETIANNLTSTIQVFTDSEYQLPYVLGSAHQGCLPPFPADVFMIPQYGYLTLNNGSQAVGRSSFYCLEYFPSQMLRTGNNFEFSYTFEDVPFHSSCAHSQSSDRLMNPLIDQYLYYLSRTRSTGGTQGTQQLLFSQAGPANMSAQAKNWLPGPCYRQQRVSTTLSQNNNSNFAWTGATKYHLNGRDSLVNPGVAMATHKDDEERFFPSSGVLMFGKQGAGRDNVDYSSVMLTSEEEIKTTNPVATEQYGVVADNLQQTNTGPIVGNVNSQGALPGMVWQNRDVYLQGPIWAKIPHTDGNFHPSPLMGGFGLKHPPPQILIKNTPVPADPPTTFSQAKLASFITQYSTGQVSVEIEWELQKENSKRWNPEIQYTSNYYKSTNVDFAVNTEGTYSEPRPIGTRYLTRNL

SEQ ID NO: 110 - protein, 738 aa, Adeno-associated virus
MAADGYLPDWLEDNLSEGIREWWDLKPGAPKPKANQQKQDDGRGLVLLGYKYLGPFNGLDKGEPVNAADAAALEHDKAYDQQLKAGDNPYLRYNHADAEFQERLQEDTSFGGNLGRAVFQAKKRVLEPLGLVEEAAKTAPGKKRPVEPSPQRSPDSSTGIGKKGQQPAKKRLNFGQTGDSESVPDPQPIGEPPAGPSGLGSGTMAAGGGAPMADNNEGADGVGSSSGNWHCDSTWLGDRVITTSTRTWALPTYNNHLYKQISNGTSGGSTNDNTYFGYSTPWGYFDFNRFHCHFSPRDWQRLINNNWGFRPKRLSFKLFNIQVKEVTQNEGTKTIANNLTSTIQVFTDSEYQLPYVLGSAHQGCLPPFPADVFMIPQYGYLTLNNGSQAVGRSSFYCLEYFPSQMLRTGNNFEFSYTFEDVPFHSGYAHSQSLDRLMNPLIDQYLYYLSRTQSTGGTQGTQQLLFSQAGPANMSAQAKNWLPGPCYRQQRVSTTLSQNNNSNFAWTGATKYHLNGRDSLVNPGVAMATHKDDEERFFPSSGVLMFGKQGAGRDNVDYSSVMLTSEEEIKTTNPVATEQYGVVADNLQQTNTGPIVGNVNSQGALPGMVWQNRDVYLQGPIWAKIPHTDGNFHPSPLMGGFGLKHPPPQILIKNTPVPADPPTTFSQAKLASFITQYSTGQVSVEIEWELQKENSKRWNPEIQYTSNYYKSTNVDFAVNTEGTYSEPRPIGTRYLTRNL

SEQ ID NO: 111 - protein, 738 aa, Unknown
  Description of Unknown: Non-human primate Adeno-associated virus sequence
MAADGYLPDWLEDNLSEGIREWWDLKPGAPKPKANQQKQDDGRGLVLPGYKYLGPFNGLDKGEPVNAADAAALEHDKAYDQQLKAGDNPYLRYNHADAEFQERLQEDTSFGGNLGRAVFQAKKRVLEPLGLVEEGAKTAPGKKRPVEPSPQRSPDSSTGIGKKGQQPAKKRLNFGQTGDSESVPDPQPIGEPPAGPSGLGSGTMAAGGGAPMADNNEGADGVGSSSGNWHCDSTWLGDRVITTSTRTWALPTYNNHLYKQISNGTSGGSTNDNTYFGYSTPWGYFDFNRFHCHFSPRDWQRLINNNWGFRPKRLNFKLFNIQVKEVTQNEGTKTIANNLTSTIQVFTDSEYQLPYVLGSAHQGCLPPFPADVFMIPQYGYLTLNNGSQAVGRSSFYCLEYFPSQMLRTGNNFEFSYQFEDVPFHSSYAHSQSLDRLMNPLIDQYLYYLSRTQSTGGTAGTQQLLFSQAGPNNMSAQAKNWLPGPCYRQQRVSTTLSQNNNSNFAWTGATKYHLNGRDSLVNPGVAMATHKDDEERFFPSSGVLMFGKQGAGKDNVDYSSVMLTSEEEIKTTNPVATEQYGVVADNLQQQNAAPIVGAVNSQGALPGMVWQNRDVYLQGPIWAKIPHTDGNFHPSPLMGGFGLKHPPPQILIKNTPVPADPPTTFSQAKLASFITQYSTGQVSVEIEWELQKENSKRWNPEIQYTSNYYKSTNVDFAVNTDGTYSEPRPIGTRYLTRNL

SEQ ID NO: 112 - protein, 728 aa, Unknown
  Description of Unknown: Non-human primate Adeno-associated virus sequence
MAADGYLPDWLEDNLSEGIREWWDLKPGAPKPKANQQKQDDGRGLVLPGYKYLGPFNGLDKGEPVNEADAAALEHDKAYDKQLEQGDNPYLKYNHADAEFQERLQEDTSFGGNLGRAVFQAKKRVLEPLGLVEEGAKTAPGKKRPIESPDSSTGIGKKGQQPAKKKLNFGQTGDSESVPDPQPLGEPPAAPSGLGSGTMAAGGGAPMADNNEGADGVGNASGNWHCDSTWLGDRVITTSTRTWALPTYNNHLYKQISSQSGATNDNHFFGYSTPWGYFDFNRFHCHFSPRDWQRLINNNWGFRPRKLRFKLFNIQVKEVTTNDGVTTIANNLTSTIQVFSDSEYQLPYVLGSAHQGCLPPFPADVFMIPQYGYLTLNNGSQSVGRSSFYCLEYFPSQMLRTGNNFEFSYTFEEVPFHSSYAHSQSLDRLMNPLIDQYLYYLARTQSTTGSTRELQFHQAGPNTMAEQSKNWLPGPCYRQQRLSKNIDSNNNSNFAWTGATKYHLNGRNSLTNPGVAMATNKDDEDQFFPINGVLVFGETGAANKTTLENVLMTSEEEIKTTNPVATEEYGVVSSNLQSSTAGPQTQTVNSQGALPGMVWQNRDVYLQGPIWAKIPHTDGNFHPSPLMGGFGLKHPPPQILIKNTPVPANPPEVFTPAKFASFITQYSTGQVSVEIEWELQKENSKRWNPEIQYTSNYAKSNNVEFAVNNEGVYTEPRPIGTRYLTRNL

SEQ ID NO: 113 - protein, 735 aa, Unknown
  Description of Unknown: Non-human primate Adeno-associated virus sequence
MAADGYLPDWLEDNLSEGIREWWDLKPGAPKPKANQQKQDDGRGLVLPGYKYLGPFNGLDKGEPVNEADAAALEHDKAYDKQLEQGDNPYLKYNHADAEFQERLQEDTSFGGNLGRAVFQAKKRVLEPLGLVEEGAKTAPGKKRPVEPSPQRSPDSSTGIGKTGQQPAKKRLNFGQTGDSESVPDPQPIGEPPAGPSGLGSGTMAAGGGAPMADNNEGADGVGSSSGNWHCDSTWLGDRVITTSTRTWALPTYNNHLYKQISNGTSGGSTNDNTYFGYSTPWGYFDFNRFHCHFSPRDWQRLINNNWGFRPRKLRFKLFNIQVKEVTTDDGVTTIANNLTSTIQVFSDSEYQLPYVLGSAHQGCLPPFPADVFMIPQYGYLTLNNGSQSVGRSSFYCLEYFPSQMLRTGNNFEFSYTFEEVPFHSSYAHSQSLDRLMNPLIDQYLYYLARTQSTTGSTRELQFHQAGPNTMAEQSKNWLPGPCYRQQRLSKNIDSNNNSNFAWTGATKYHLNGRNSLTNPGVAMATNKDDEDQFFPINGVLVFGKTGAANKTTLENVLMTSEEEIKTTNPVATEEYGVVSSNLQSSTAGPQTQTVNSQGALPGMVWQNRDVYLQGPIWAKIPHTDGNFHPSPLMDGFGLKHPPPQILIKNTPVPANPPEVFTPAKFASFITQYSTGQVSVEIEWELQKENSKRWNPEIQYTSNYAKSNNVEFAVNNEGVYTEPRPIGTRYLTRNL

SEQ ID NO: 114 - protein, 728 aa, Unknown
  Description of Unknown: Non-human primate Adeno-associated virus sequence
MAADGYLPDWLEDNLSEGIREWWDLKPGAPKPKANQQKQDDGRGLVLPGYKYLGPFNGLDKGEPVNAADAAALEHDKAYDQQLKAGDNPYLRYNHADAEFQERLQEDTSFGGNLGRAVFQAKKRVLEPLGLVEEGAKTAPGKKRPIESPDSSTGIGKKGQQPAKKKLNFGQTGDSESVPDPQPIGEPPAGPSGLGSGTMAAGGGAPMADNNEGADGVGNASGNWHCDSTWLGDRVITTSTRTWALPTYNNHLYKQISSQSGATNDNHFFGYSTPWGYFDFNRFHCHFSPRDWQRLINNNWGFRPRKLRFKLFNIQVKEVTTNDGVTTIANNLTSTIQVFSDSEYQLPYVLGSAHQGCLPPFPADVFMIPQYGYLTLNNGSQSVGRSSFYCLEYFPSQMLRTGNNFEFSYTFEEVPFHSSYAHSQSLDRLMNPLIDQYLYYLARTQSTTGSTRELQFHQAGPNTMAEQSKNWLPGPCYRRQRLSKDIDSNNNSNFAWTGATKYHLNGRNSLTNPGVAMATNKDDEDQFFPINGVLVFGKTGAANKTTLENVLMTSEEEIKTTNPVATEEYGVVSSNLQSSTAGPQTQTVNSQGALPGMVWQNRDVYLQGPIWAKIPHTDGNFHPSPLMGGFGLKHPPPQILIKNTPVPANPPEVFTPAKFASFITQYSTGQVSVEIEWELQKENSKRWNPEIQYTSNYAKSNNVEFAVNNEGVYTEPRPIGTRYLTRNL

SEQ ID NO: 115 - protein, 685 aa, Unknown
  Description of Unknown: Non-human primate Adeno-associated virus sequence
MAADGYLPDWLEDNLSEGIREWWDLKPGAPKPKANQQKQDDGRGLVLPGYKYLGPFNGLDKGEPVNEADAAALEHDKAYDKQLEQGDNPYLKYNHADAEFQERLQEDTSFGGNLGRAVFQAKKRVLEPLGLVEEGAKTAPGKKRPVEPSPQRSPDSSTGIGKTGQQPAKKRLNFGQTGDSESVPDPQPIGEPPAGPSGLGSGTMAAGGGAPMADNNEGADGVGSSSGNWHCDSTWLGDRVITTSTRTWALPTYNNHLYKQISNGTSGGSTNDNTYFGYSTPWGYFDFNRFHCHFSPRDWQRLINNNWGFRPKRLNFKLFNIQVKEVTQNEGTKTIANNLTSTIQVFTDSEYQLPYVLGSAHQGCLPPFPADVFMIPQYGYLTLNNGSQAVGRSSFYCLEYFPSQMLRTGNNFEFSYQFEDVPFHSSYAHSQSLDRLTNPLIDQYLYYLARTQSTTGSTRGLQFHQAGPNTMAEQSKNWLPGPCYRQQRLSKNIDSNNNSNFAWTGATKYHLNGRNSLTNPGVAMATNKDDEDQFFPINGVLVFGKTGAANKTTLENVLMTSEEEIKTTNPVATEEYGVVSSNLQSSTAGPQTQTVNSQGALPGMVWQNRDVYLQGPIWAKIPHTDGNFHPSPLMGGFGLKHPPPQILIKYTSNYYKSTNVDFAVNTEGTYSEPRPIGTRYLTRNL

SEQ ID NO: 116 - protein, 733 aa, Unknown
  Description of Unknown: Non-human primate Adeno-associated virus sequence
MAADGYLPDWLEDNLSEGIREWWDLKPGAPKPKANQQKQDDGRGLVLPGYKYLGPFNGLDKGEPVNAADAAALEHDKAYDQQLKAGDNPYLRYNHADAEFQERLQEDTSFGGNLGRAVFQAKKRVLEPLGLVEEGAKTAPGKKRPIESPDSSTGIGKKGQQPAKKKLNFGQTGDSESVPDPQPIGEPPAGPSGLGSGTMAAGGGAPMADNNEGADGVGSSSGNWHCDSTWLGDRVITTSTRTWALPTYNNHLYKQISNGTSGGSTNDNTYFGYSTPWGYFDFNRFHCHFSPRDWQRLINNNWGFRPKRLNFKLFNIQVKEVTQNEGTKTIANNLTSTIQVFTDSEYQLPYVLGSAHQGCLPPFPADVFMIPQYGYLTLNNGSQAVGRSSFYCLEYFPSQMLRTGNNFEFSYQFEDVPFHSSYAHSQSLDRLMNPLIDQYLYYLSRTQSTGGTAGTQQLLFSQAGPNNMSAQAKNWLPGPCYRQQRVSTTVSQNNNSNFAWTGATKYHLNGRDSLVNPGVAMATHKGDEERFFPSSGVLMFGKQGAGKDNVDYSSVMLTSEEEIKTTNPVATEQYGVVADNLQQQNAAPIVGAVNSQGALPGMVWQNRDVYLQGPIWAKIPHTDGNFHPSPLMGGFGLKHPPPQILIKNTPVPADPPTTFSQAKLASFITQYSTGQVSVEIEWELQKENSKRWNPEIQYTSNYYKSTNVDFAVNTEGTYSEPRPIGTRYLTRSL

SEQ ID NO: 117 - protein, 729 aa, Unknown
  Description of Unknown: Non-human primate Adeno-associated virus sequence
MAADGYLPDWLEDNLSEGIREWWDLKPGAPKPKANQQKQDDGRGLVLPGYKYLGPFNGLDKGEPVNAADAAALEHDKAYDQQLKAGDNPYLRYNHADAEFQERLQEDTSFGGNLGRAVFQAKKRVLEPLGLVEEGAKTAPGKKRPIDSPDSSTGIGKKGQQPAKKKLNFGQTGDSESVPDPQPLGEPPAAPSSVGSGTMAAGGGAPMADNNEGADGVGNASGNWHCDSTWLGDRVITTSTRTWALPTYNNHLYKQISSSSSGATNDNHYFGYSTPWGYFDFNRFHCHFSPRDWQRLINNNWGFRPKKLRFKLFNIQVKEVTTNDGVTTIANNLTSTVQVFSDSEYQLPYVLGSAHQGCLPPFPADVFMIPQYGYLTLNNGSQSVGRSSFYCLEYFPSQMLRTGNNFEFSYSFEDVPFHSSYAHSQSLDRLMNPLIDQYLYYLARTQSTTGSTRELQFHQAGPNTMAEQSKNWLPGPCYRQQGLSKNLDFNNNSNFAWTAATKYHLNGRNSLTNPGIPMATNKDDEDQFFPINGVLVFGKTGAANKTTLENVLMTSEEEIKTTNPVATEEYGVVSSNLQPSTAGPQSQTINSQGALPGMVWQNRDVYLQGPIWAKIPHTDGNFHPSPLMGGFGLKHPPPQILIKNTPVPANPPEVFTPAKFASFITQYSTGQVSVEIEWELQKENSKRWNPEIQYTSNYAKSNNVEFAVNPDGVYTEPRPIGTRYLPRNL

SEQ ID NO: 118 - protein, 736 aa, Unknown
  Description of Unknown: Non-human primate Adeno-associated virus sequence
MAADGYLPDWLEDNLSEGIREWWDLKPGAPKPKANQQKQDDGRGLVLPGYKYLGPFNGLDKGEPVNAADAAALEHDKAYDQQLEAGDNPYLRYNHADAEFQERLQEDTSFGGNLGRAVFQAKKRVLEPLGLVEEGAKTAPGKKRPVEQSPQEPDSSSGIGKKGQQPARKRLNFGQTGDSESVPDPQPLGEPPAAPSGVGPNTMAAGGGAPMADNNEGADGVGSSSGNWHCDSTWLGDRVITTSTRTWALPTYNNHLYKQISNGTSGGATNDNTYFGYSTPWGYFDFNRFHCHFSPRDWQRLINNNWGFRPKRLSFKLFNIQVKEVTQNEGTKTIANNLTSTIQVFTDSEYQLPYVLGSAHQGCLPPFPADVFMIPQYGYLTLNNGSQAVGRSSFYCLEYFPSQMLRTGNNFQFTYTFEDVPFHSSYAHSQSLDRLMNPLIDQYLYYLSRTQTTGGTANTQTLGFSQGGPNTMANQAKNWLPGPCYRQQRVSTTTGQNNNSNFAWTAGTKYHLNGRNSLANPGIAMATHKDDEERFFPVTGSCFWQQNAARDNADYSDVMLTSEEEIKTTNPVATEEYGIVADNLQQQNTAPQIGTVNSQGALPGMVWQNRDVYLQGPIWAKIPHTDGNFHPSPLMGGFGLKHPPPQILIKNTPVPADPPTTFNQSKLNSFITQYSTGQVSVEIEWELQKENSKRWNPEIQYTSNYYKSTSVDFAVNTEGVYSEPRPIGTRYLTRNL

SEQ ID NO: 119 - protein, 737 aa, Unknown
  Description of Unknown: Non-human primate Adeno-associated virus sequence
MAADGYLPDWLEDNLSEGIREWWDLKPGAPKPKANQQKQDDGRGLVLPGYKYLGPFNGLDKGEPVNAADAAALEHDKAYDQQLKAGDNPYLRYNHADAEFQERLQEDTSFGGNLGRAVFQAKKRVLEPLGLVEEAAKTAPGKKRPVEPSPQRSPDSSTGIGKKGQQPARKRLNFGQTGDSESVPDPQPIGEPPAGPSGLGSGTMAAGGGAPMADNNKGADGVGNASGNWHCDSTWLGDRVITTSTRTWALPTYNNHLYKQISSQSAGSTNDNVYFGYSTPWGYFDFNRFHCHFSPRDWQRLINSNWGFRPKKLNFKLFNIQVKEVTTNDGVTTIANNLTSTVQVFSDSEYQLPYVLGSAHQGCLPPFPADVFMIPQYGYLTLNNGSQSVGRSSFYCLEYFPSQMLRTGNNFTFSYTFEDVPFHSSYAHSQSLDRLMNPLIDQYLYYLARTQSNAGGTAGNRELQFYQGGPTTMAEQAKNWLPGPCFRQQRVSKTLDQNNNSNFAWTGATKYHLNGRNSLVNPGVAMATHKDDEERFFPSSGVLIFGKTGAANKTTLENVLMTNEEEIRPTNPVATEEYGTVSSNLQAANTAAQTQVVNNQGALPGMVWQNRDVYLQGPIWAKIPHTDGNFHPSPLMGGFGLKHPPPQILIKNTPVPANPPEVFTPAKFASFITQYSTGQVSVEIEWELQKENSKRWNPEIQYTSNFDKQTGVDFAVDSQGVYSEPRPIGTRYLTRNL

SEQ ID NO: 120 - protein, 738 aa, Unknown
  Description of Unknown: Non-human primate Adeno-associated virus sequence
MAADGYLPDWLEDNLSEGIREWWDLKPGAPKPKANQQKQDDGRGLVLPGYKYLGPFNGLDKGEPVNAADAAALEHDKAYDQQLKAGDNPHLRYNHADAEFQERLQEDTSFGGNLGRAVFQAKKRVLEPLGLVEEGAKTAPGKKRPVEPSPQRSPDSSTGIGKKGQQPARKRLNFGQTGDSESVPDPQLIGEPPAAPSSVGSGTMAAGGGAPMADNNEGADGVGSSSGNWHCDSTWLGDRVITTSTRTWALPTYNNHLYKQISNGTSGGSTNDNTYFGYSTPWGYFDFNRFHCHFSPRDWQRLINNNWGFRPKRLSFKLFNIQVKEVTQNEGTKTIANNLTSTIQVFTDSEYQLPYVLGSAHQGCLPPFPADVFMIPQYGNLTLNNGSQAVGRSSFYCLEYFPSQMLRTGNNFSFSYTFEDVPFHSSYAHSQSLDRLMNPLIDQYLYYLSRTQSTGGTAGTQQLLFSQAGPSNMSAQARNWLPGPCYRQQRVSTTLSQNNNSNFAWTGATKYHLNGRDSLVNPGVAMATNKDDEDRFFPSSGILMFGKQGAGKDNMGYSNVMLTSEEEIKTTNPVATEQYGVVADNLQQQNTAPIVGAVNSQGALPGMVWQNRDVYLQGPIWAKIPHTDGNFHPSPLMGGFGLKHPPPQILIKNTPVPADPPTAFNQAKLNSFITQYGTGQVSVEIEWELQKENSKRWNPEIQYTSNYYKSTNVDFAVNTEGVYSEPRPIGTRYLTRNL

SEQ ID NO: 121 - protein, 738 aa, Unknown
  Description of Unknown: Non-human primate Adeno-associated virus sequence
MAADGYLPDWLEDNLSEGIREWWDLKPGAPKPKANQQKQDDGRGLVLPGYKYLGPFNGLDKGEPVNAADAAALEHDKAYDQQLKAGDNPYLRYNHADAEFQERLQEDTSFGGNLGRAVFQAKKRVLEPLGLVEEGAKTAPGKKRPVEPSPQRSPDSSTGIGKKGQQPAGKRLNFGQTGDSESVPDPQPIGEPPAAPSSVGSGTMAAGGGAPMADNNEGADGVGSSSGNWHCDSTWLGDRVITTSTRTWALPTYNNHLYKQISNGTSGGSTNDNTYFGYSTPWGYFDFNRFHCHFSPRDWQRLINNNWGFRPKRLSFKLFNIQVKEVTQNEGTKTIANNLTSTIQVFTDSEYQLPYVLGSAHQGCLPPFPADVFMIPQYGYLTLNNGSQAVGRSSFYCLEYFPSQMLRTGNNFSFSYTFEDVPFHSSYAHSQSLDRLMNPLVDQYLYYLSRTQSTGGTAGTQQLLFSQAGPSNMSAQARNWLPGPCYRQQRVSTTLSQNNNSNFAWTGATKYHLNGRDSLVNPGVAMATNKDDEDRFFPSSGILMFGKQGAGKDNVDYSNVMLTSEEEIKTTNPVATEQYGVVADNLQQQNTAPIVGAVNSQGALPGMVWQNRDVYLQGPIWAKIPHTDGNFHPSPLMGGFGLKHPPPQILIKNTPVPADPPTAFNQAKLNSFITQYSTGQVSVEIEWELQKENSKRWSPEIQYTSNYYKSTNVDFAVNTEGVYSEPRPIGTRYLTRNL

SEQ ID NO: 122 - protein, 738 aa, Unknown
  Description of Unknown: Non-human primate Adeno-associated virus sequence
MVADGYLPDWLEDNLSEGIREWWDLKPGAPKPKANQQKQGDGRGLVLPGYKYLGPFNGLDKGEPVNAADAAALEHDKAYDQQLKAGDNPYLRYNHADAELQERLQEDTSFGGNLGRAVFQAKKRVLEPLGLVEEGAKTAPGKKRPVEPSPQRSPDSSTGIGKKGQQPARKRLNFGQTGDSESVPDPQPIGEPPAAPSSVGSGTMAAGGGAPMADNNEGADGVGSSSGNWHCDSTWLGDRVITTSTRTWALPTYNNHLYKQISNGTSGGSTNDNTYFGYSTPWGYFDFNRFHCHFSPRDWQRLINNNWGFRPKRLSFKLFNIQVKEVTQNEGTKTIANNLTSTIQVFTDSEYQLPYVLGSAHQGCQPPFPADVFMIPQYGYLTLNNGSQAVGRSSFYCLEYFPSQMLRTGNNFSFSYTFEDVPFHSSYAHSQSLDRLMNPLIDQYLYYLSRTQSTGGTAGTQQLLFSQAGPSNMSAQARNWLPGPCYRQQRVSTTLSQNNNSNFAWTGATKYHLNGRDSLVNPGVAMATNKDDEDRFFPSSGILMFGKQGAGKDNVDYSNVMLTSEEEIKTTNPVATEQYGVVADNLQQQNTAPIVGAVNSQGALPGMVWQNRDVYLQGPIWAKIPHTDGNFHPSPLMGGFGLKHPPPQILIKNTPVPADPPTAFNQAKLNSFITQYSTGQVSVEIEWEPQKENSKRWNPEIQYTSNYYKSTNVDFAVNTEGVYSEPRPIGTRYLTRNL

SEQ ID NO: 123 - protein, 738 aa, Unknown
  Description of Unknown: Non-human primate Adeno-associated virus sequence
MAADGYLPDWLEDNLSEGIREWWDLKPGAPKPKANQQKQDDGRGLVLPGYKYLGPFNGLDKGEPVNAADAAALEHDKAYDQQLKAGDNPYLRYNHADAEFQERLQEDTSFGGNLGRAVFQAKKRVLEPLGLVEEGAKTAPGKKRPVEPSPQRSPDSSTGIGKKGQQPARKRLNFGQTGDSESVPDPQPIGEPPAAPSSVGSGTMAAGGGAPMADNNEGADGVGSSSGNWHCDSTWLGDRVITTSTRTWALPTYNNHLYKQISNGTSGGSTNDNTYFGYSTPWGYFDFNRFHCHFSPRDWQRLINNNWGFRPKRLSFKLFNIQVKEVTQNEGTKTIANSLTSTIQVFTDSEYQLPYVLGSAHQGCLPPFPADVFMIPQYGYLTPNNGSQAVGRSSFYCLEYFPSQMLRTGNNFSFSYTFEDVPFHSSYAHSQSLDRLMNPLIDQYLYYLSRTQSTGGTAGTQQLLSSQAGPSNMSAQARNWLPGPCYRQQRVSTTLSQNNNSNFAWTGATKYHLNGRDSLVNPGVAMATNKDDEDRFFPSSGILMFGKQGAGKDNVDYSNVMLTSEEEIKTTNPVATEQYGVVADNLQQQNTAPIVGAVNSQGALPGMVWQNRDVYLQGPIWAKIPHTDGNFHPSPLMGGFGLKHPPPQILIKNTPVPADPPTAFNQAKLNSFITQYSTGQVSVEIEWELQKENSKRWNPEIQYTSNYYKSTNVDFAVNTEGVYSEPRPIGTRYLTRNL

SEQ ID NO: 124 - protein, 738 aa, Unknown
  Description of Unknown: Non-human primate Adeno-associated virus sequence
MAADGYLPDWLEDNLSEGIREWWDLKPGAPKPKANQQKQDDGRGLVLPGYKYLGPFNGLDKGEPVNAADAAALEHDKAYDQQLKAGDNPYLRYNHADAEFQERLQEDTSFGGNLGRAVFQAKKRVLEPLGLVEEGAKTAPGKKRPVEPSPQRSPDSSTGIGKKGQQPARKRLNFGQTGDSESVPDPQPIGEPPAAPSSVGSGTMAAGGGAPMADNNEGADGVGSSSGNWHCDSTWLGDRVITTSTRTWALPTYNNHLYKQISNGTSGGSTNDNTYFGYSTPWGYFDFNRFHCHFSPRDWQRLINNNWGFRPKRLSFKLFNIQVKEVTQNEGTKTIANNLTSTIQVFTDSEYQLPYVLGSAHQGCLPPFPADVFMIPQYGYLTLNNGSQAVGRSSFYCLEYFPSQMLRTGNNFSFSYTFEDVPFHSSYVHSQSLDRLMNPLIDQYLYYLSRTQSTGGTAGTQQLLFSQAGPSNMSAQARNWLPGPCYRQQRVSTTLSQNNNSNFAWTGATKYHLNGRDSLVNSGVAMATNKDDEDRFFPSSGILMFGKQGAGKDNVDYSNVMLTSEEEIKTTNPVATEQYGVVADNLQQQNTAPIVGAVNSQGALPGMVWQNRDVYLQGPIWAKIPHTDGNFHPSPLMGGFGLKHPPPQILIKNTPVPADPPTAFNQAKLNSFITQYSTGQVSVEIEWELQKENSKRWNPEIQYTSNYYKSTNVDFAVNTEGVYSEPRPIGTRYPTRNL

SEQ ID NO: 125 - protein, 737 aa, Unknown
  Description of Unknown: Non-human primate Adeno-associated virus sequence
MAADGYLPDWLEDNLSEGIREWWDLKPGAPKPKANQQKQDDGRGLVLPGYKYLGPFNGLDKGEPVNAADAAALEHDKAYDQQLKAGDNPYLRYNHADAEFQERLQEDTSFGGNLGRAVFQAKKRVLEPLGLVEEAAKTAPGKKRPVEPSPQRSPDSSTGIGKKGQQPARKRLNFGQTGDSESVPDPQPLGEPPAGPSGLGSGTMAAGGGAPMADNNEGADGVGNASGNWHCDSTWLGDRVITTSTRTWALPTYNNHLYKQISSQSAGSTNDNVYFGYSTPWGYFDFNRFHCHFSPRDWQRLINNNWGFRPKKLNFKLFNIQVKEVTTNDGVTTIANNLTSTVQVFSDSEYQLPYVLGSAHQGCLPPFPADVFMIPQYGYLTLNNGSQSVGRSSFYCLEYFPSQVLRTGNNFTFSYTFEDVPFHSSYAHSQSLDRLMNPLIDQYLYYLARTQSNPGGTSGNRELQFYQGGPSTMAEQAKNWLPGPCFRQQRVSKTLDQNNNSNFAWTGATKYHLNGRNSLVNPGVAMATHKDDEDRFFPSSGVLIFGKTGATNKTTLENVLMTNEEEIRPTNPVATEEYGIVSSNLQAANTAAQTQVVNNQGALPGMVWQNRDVYLQGPIWAKIPHTDGNFHPSPLMGGFGLKHPPPQILIKNTPVPANPPEVFTPAKFASFITQYSTGQVSVEIEWELQKENSKRWNPEIQYTSNFDKQTGVDFAVDSQGVYSEPRPIGTRYLTRNL

SEQ ID NO: 126 - protein, 737 aa, Unknown
  Description of Unknown: Non-human primate Adeno-associated virus sequence
MAADGYLPDWLEDNLSEGIREWWDLKPGAPKPKANQQKQDDGRGLVLPGYKYLGPFNGLDKGEPVNAADAAALEHDKAYDQQLKAGDNPYLRYNHADAEFQERLQEDTSFGGNLGRAVFQAKKRVLEPLGLVEEGAKTAPGKKRPVEPSPQRSPDSSTGIGKKGQQPARKRLNFGQTGDSESVPDPQPIGEPPAAPSSVGSGTMAAGGGAPMADNNEGADGVGSSSGNWHCDSTRLGDRVITTSTRTWALPTYNNHLYKQISSQSAGSTNDNVYFGYSTPWGYFDFNRFHCHFSPRDWQRLINNNWGFRPKKLNFKLFNIQVKEVTTNDGVTTIANNLTSTVQVFSDSEYQLPYVLGSAHQGCLPPFPADVFMIPQYGYLTLNNGSQSVGRSSFYCLEYFPSQMLRTGNNFTFSYTFEDVPFHSSYAHSQSLDRLMNPLIDQYLYYLARTQSNAGGTAGNRELQFYQGGPTTMAEQAKNWLPGPCFRQRRVSKTLDQNNNSNFAWTGATKYHLNGRNSLVNPGVAMATHKDDEERFFPSSGVLIFGKTGAANKTTLENVLMTNEEEIRPTNPVATEEYGTVSSNLQAANTAAQTQVVNNQGALPGMVWQNRDVYLQGPIWAKIPHTDGNFHPSPLMGGFGLKHPPPQILIKNTPVPANPPEVFTPAKFASFITQYSTGQVSVEIEWELQKENSKRWNPEIQYTSNFDKQTGVDFAVDSQGVYSEPRPIGTRYLTRNL

SEQ ID NO: 127 - protein, 738 aa, Unknown
  Description of Unknown: Non-human primate Adeno-associated virus sequence
MAADGYLPDWLEDNLSEGIREWWALKPGAPKPKANQQKQDDGRGLVLPGYKYLGPFNGLDKGEPVNAADAAALEHDKAYDQQLQAGDNPYLRYNHADAEFQERLQEDTSFGGNLGRAVFQAKKRVLEPLGLVEEGAKTAPGKKRPVEPSPQRSPDSSTGIGKKGQQPARKRLNFGQTGDSESVPDPQPIGEPPAAPSSVGSGTMAAGGGAPMADNNEGADGVGSSSGNWHCDSTWLGDRVITTSTRTWALPTYNNHLYKQTSNGTSGGSTNDNTYFGYSTPWGYFDFNRFHCHFSPRDWQRLINNNWGFRPKRLSFKLFNIQVKEVTQNEGTKTIANNLTSTIQVFTDSEYQLPYVLGSAHQGCLPPFPADVFMIPQYGYLTLNNGSQAVGRSSFYCLEYFPSQMLRTGNNFSFSYTFEDVPFHSSYAHSQSLDRLMNPLIDQYLYYLSRTQSTGGTAGTQQLLFSQAGPSNMSAQARNWLPGPCYRQQRVSTTLSQNNNSNFAWTGATKYHLNGRDSLVNPGVAMATNKDDEDRFFPSSGILMFGKQGAGKDNVDYSNVMLTSEEEIKTTNPVATEQYGVVADNLQQQNTAPIVGAVNSQGALPGMVWQNRDVYLQGPIWAKIPHTDGNFHPSPLMGGFGLKHPPPQILIKNTPVPADPPTAFNQAKLNSFITQYSTGQVSAEIEWELQKENSKRWNPEIQYTSNYYKSTNVDFAVNTEGVYSEPRPIGTRYLTRNL

SEQ ID NO: 128 - protein, 738 aa, Unknown
  Description of Unknown: Non-human primate Adeno-associated virus sequence
MAADGYLPDWLEDNLSEGIREWWDLKPGAPKPKANQQKQDDGRGLVLPGYKYLGPFNGLDKGEPVNAADAAALEHDKAYDQQLKAGDNPYLRYNHADAEFQERLQEDTSFGGNLGRAVFQAKKRVLEPLGLVEEAAKTAPGKKRPVEPSPQRSPDSSTGIGKKGQQPARKRLNFGQTGDSESVPDPQPIGEPPAAPSSVGSGTMAAGGGAPMADNNEGADGVGSSSGNWHCDSTWLGDRVITTSTRTWALPTYNNHLYKQISNGTSGGSTNDNTYFGYSTPWGYFDFNRFHCHFSPRDWQRLINNNWGFRPKRLSFKLFNIQVKEVTQNEGTKTIANNLTSTIQVFTDSEYQLPYVLGSAHQGCLPPFPADVFMIPQYGYLTLNNGSQAVGRSSFYCLEYFPSQMLRTGNNFSFSYTFEDVPFHSSYAHSQSLDRLMNPLIDQYLYYLSRTQSTGGTAGTQQLLFSQAGPSNMSAQARNWLPGPCYRQQRVSTTLSQNNNSNFAWTGATKYHLNGRDSLVNPGVAMATNKDDEDRFFPSSGILMFGKQGAGKDNVDYSNVMLTSEEEIKTTNPVATEQYGVVADNLQQQNTAPIVGAVNSQGALPGMVWQNRDVYLQGPIWAKIPHTDGNFHPSPLMGGFGLKHPPPQILIKSTPVPADPPTAFNQAKLNSFITQYSTGQVSVEIEWELQKENSKCWNPEIQYTSNYYKSTNVDFAVNTEGVYSEPRPIGTRYLTRNL

SEQ ID NO: 129 - protein, 737 aa, Unknown
  Description of Unknown: Non-human primate Adeno-associated virus sequence
MAADGYLPDWLEDNLSEGIREWWDLKPGAPKPKANQQKQDDGRGLVLPGYKYLGPFNGLDKGEPVNAADAAALEHDKAYDQQLKAGDNPYLRYNHADAEFQERLQEDTSFGGNLGRAVFQAKKRVLEPLGLAEEAAKTAPGKKRPVEPSPQRSPDSSTGIGKKGQQPARKRLNFGQTGDSESVPDPQPIGEPPAGPSGLGSGTMAAGGGAPMADNNKGADGVGNASGNWHCDSTWLGDRVITTSTRTWALPTYNNHLYKQISSQSAGSTNDNVYFGYSTPWGYFDFNRFHCHFSPRDWQRLINNNWGFRPKKLNFKLFNIQVKEVTTGDGVTTIANNLTSTVQVFSDSEYQLPYVLGSAHQGCLPPFPADVFMIPQYGYLTLNNDSQSVGRSSFYCLEYFPSQMLRTGNNFTFSYTFEDVPFHSSYAHSQSLDRLMNPLIDQYLYYLARTQSNAGGTAGNRELQFYQGGPTTMAEQAKNWLPGPCFRQQRVSKTLDQNNNSNFAWTGATKYHLNGRNSLVNPGVAMATHKDDEERFFPSSGVLIFGKTGAANKTTLENVLMTNEEEIRPTNPVATEEYGTVSSNLQAANTAAQTQVVNNQGALPGMVWQNRDVYLQGPIWAKIPHTDGNFHPSPLMGGFGLKHPPPQILIKNTPVPANPPEVFTPAKFASFITQYSTGQVSVEIEWELQKENSKRWNPEIQYTSNFDKQTGVDFAVDSQGVYSEPRPIGTRYLTRNL

SEQ ID NO: 130 - protein, 738 aa, Unknown
  Description of Unknown: Non-human primate Adeno-associated virus sequence
MAADGYLPDWLEDNLSEGIREWWDLKPGAPKPKANQQKQDDGRGLVLPGYKYLGPFNGLDKGEPVNAADAAALEHDKAYDQQLKAGDNPYLRYNHADAEFQERLQEDTSFGGNLGRAVFQAKKRVLEPLGLVEEGAKTAPGKKRPVEPSPQRSPDSSTGIGKKGQQPARKRLNFGQTGDSESVPDPQPIGEPPAAPSSVGSGTMAAGGGAPMADNNEGADGVGSSSGNWHCDSTWLGDRVITTSTRTWALPTYNNHLYKQISNGTSGGSTNDNTYFGYSTPWGYFDFNRFHCHFSPRDWQRLINNNWGFRPKRLSFKLFNIQVKEVTQNEGTKTIANNLTSTIQVFTDSEYQLPYVLGSAHQGCLPPFPADVFMIPQYGYLTLNNGSQAVGRSSFYCLEYFPSQMLRTGNNFSFSYTFEDVPFHSSYAHSQSLDRLMNPLIDQYLYYLSRTQSTGGTAGTQQLLFSQAGPSNMSAQARNWLPGPCYRQQRVSTTLSQNNNSNFAWTGATKYHLNGRDSLVNPGVAMATNKDDEDRFFPSSGILMFGKQGAGKDNVDYSNVMLTSEEEIKTTNPVATEQYGVVADNLQQQNTAPIVGAVNSQGALPGMVWQNRDVYLQGPIWAKIPHTDGNFHPSPLMGGFGLKHPPPQILIKNTPVPADPPTAFNQAKLNSFITQYSTGQVSVEIVWELQKENSKRRNPEIQYTSNYYKSTNVDFAVNTEGVYSEPRPIGTRYLTRNL

SEQ ID NO: 131 - protein, 735 aa, Unknown
  Description of Unknown: Non-human primate Adeno-associated virus sequence
MAADGYLPDWLEDTLSEGIRQWWKLKPGPPPPKPAERHKDDSRGLVLPGYKYLGPFNGLDKGEPVNEADAAALEHDKAYDRQLDSGDNPYLKYNHADAEFQERLKEDTSFGGNLGRAVFQAKKRVLEPLGLVEEPVKTAPGKKRPVEHSPAEPDSSSGTGKAGQQPARKRLNFGQTGDADSVPDPQPLGQPPAAPSGLGSTTMATGSGAPMADNNEGADGVGNSSGNWHCDSQWLGDRVITTSTRTWAQPTYNNHLYKQISSQSGASNDNHYFGYSTPWGYFDFNRFHCHFSPRDWQRLINNNWGFRPKRLNFKLFNIQVKEVTQNDGTTTIANNLTSTVQVFTDSEYQLPYVLGSAHQGCLPPFPADVFMVPQYGYLTLNNGSQAVGRSSFYCLEYFPSQMLRTGNNFQFSYTFEDVPFHSSYAHSQSLDRLMNPLIDQYLYYLNKTQSNSGALQQSRLLFSQAGPTSMSLQAKNWLPGPCYRQQRLSKQANDNNNSNFPWTAATKYHLNGRDSLVNPGPAMASHKDDEEKFFPMHGTLIFGKQGTNANDADLDNVMITDEEEIRTTNPVATEQYGYVSNNLQNSNTGPTTGTVNHRGALPGMVWQDRDVYLQGPIWAKIPHTDGHFHPSPLMGGFGLKHPPPQIMIKNTPVPANPPTNFSSAKFASFITQYSTGQVSVEIEWELQKENSKRWNPEIQYTSNYNKSVNVDFTVDTNGVYSEPRPIGTRYLTRNL

SEQ ID NO: 132 - protein, 736 aa, Artificial Sequence
  Description of Artificial Sequence: Synthetic polypeptide
  MOD_RES (168)..(168): Lys or Arg
  MOD_RES (205)..(205): Ala or Ser
  MOD_RES (266)..(266): Ala or Gly
  MOD_RES (311)..(311): Arg or Lys
  MOD_RES (411)..(411): Glu or Gln
  MOD_RES (460)..(460): Thr or Glu
  MOD_RES (493)..(493): Ala or Thr
  MOD_RES (562)..(562): Ser or Asn
  MOD_RES (576)..(576): Gln or Glu
  MOD_RES (587)..(587): Ser or Ala
  MOD_RES (609)..(609): Asn or Asp
MAADGYLPDWLEDNLSEGIREWWDLKPGAPKPKANQQKQDDGRGLVLPGYKYLGPFNGLDKGEPVNAADAAALEHDKAYDQQLKAGDNPYLRYNHADAEFQERLQEDTSFGGNLGRAVFQAKKRVLEPLGLVEEGAKTAPGKKRPVEQSPQEPDSSSGIGKKGQQPAXKRLNFGQTGDSESVPDPQPLGEPPAAPSGVGSNTMAXGGGAPMADNNEGADGVGNASGNWHCDSTWLGDRVITTSTRTWALPTYNNHLYKQISSQSGXSTNDNTYFGYSTPWGYFDFNRFHCHFSPRDWQRLINNNWGFRPKXLNFKLFNIQVKEVTTNDGTTTIANNLTSTVQVFTDSEYQLPYVLGSAHQGCLPPFPADVFMIPQYGYLTLNNGSQAVGRSSFYCLEYFPSQMLRTGNNFXFSYTFEDVPFHSSYAHSQSLDRLMNPLIDQYLYYLSRTQTTSGTAGNRXLQFSQAGPSSMANQAKNWLPGPCYRQQRVSKTXNQNNNSNFAWTGATKYHLNGRDSLVNPGPAMATHKDDEDKFFPMSGVLIFGKQGAGNSNVDLDNVMITXEEEIKTTNPVATEXYGTVATNLQSXNTAPATGTVNSQGALPGMVWQXRDVYLQGPIWAKIPHTDGHFHPSPLMGGFGLKHPPPQILIKNTPVPANPPTTFSPAKFASFITQYSTGQVSVEIEWELQKENSKRWNPEIQYTSNYNKSTNVDFAVDTNGVYSEPRPIGTRYLTRNL

SEQ ID NO: 133 - protein, 737 aa, Artificial Sequence
  Description of Artificial Sequence: Synthetic polypeptide
  MOD_RES (157)..(157): Thr or Ser
  MOD_RES (168)..(168): Lys or Arg
  MOD_RES (262)..(262): Asn or Ser
  MOD_RES (263)..(263): Ser or His
  MOD_RES (312)..(312): Arg or Lys
  MOD_RES (412)..(412): Glu or Gln
  MOD_RES (460)..(460): Arg or Gln
  MOD_RES (461)..(461): Thr or Glu
  MOD_RES (552)..(552): Asp or Ser
  MOD_RES (556)..(556): Leu or Tyr
  MOD_RES (557)..(557): Asp or Ser
  MOD_RES (563)..(563): Ser or Asn
  MOD_RES (580)..(580): Val or Ile
  MOD_RES (588)..(588): Asn or Ser
  MOD_RES (664)..(664): Ser or Thr
MAADGYLPDWLEDNLSEGIREWWDLKPGAPKPKANQQKQDDGRGLVLPGYKYLGPFNGLDKGEPVNAADAAALEHDKAYDQQLKAGDNPYLRYNHADAEFQERLQEDTSFGGNLGRAVFQAKKRVLEPLGLVEEGAKTAPGKKRPVEQSPQEPDSSXGIGKKGQQPAXKRLNFGQTGDSESVPDPQPLGEPPAAPSGVGSNTMAAGGGAPMADNNEGADGVGNASGNWHCDSTWLGDRVITTSTRTWALPTYNNHLYKQISXXQSGGSTNDNTYFGYSTPWGYFDFNRFHCHFSPRDWQRLINNNWGFRPKXLNFKLFNIQVKEVTTNDGTTTIANNLTSTVQVFTDSEYQLPYVLGSAHQGCLPPFPADVFMIPQYGYLTLNNGSQAVGRSSFYCLEYFPSQMLRTGNNFXFSYTFEDVPFHSSYAHSQSLDRLMNPLIDQYLYYLSRTQTTGGTAGNXXLQFSQAGPSSMANQAKNWLPGPCYRQQRVSKTTNQNNNSNFAWTGATKYHLNGRDSLVNPGVAMATHKDDEDRFFPSSGVLIFGKQGAGNXNVDXXNVMITXEEEIKTTNPVATEEYGXVATNLQSXNTAPQTGTVNSQGALPGMVWQNRDVYLQGPIWAKIPHTDGNFHPSPLMGGFGLKHPPPQILIKNTPVPANPPTTFXPAKFASFITQYSTGQVSVEIEWELQKENSKRWNPEIQYTSNYNKSTNVDFAVDTEGVYSEPRPIGTRYLTRNL

SEQ ID NO: 134 - protein, 738 aa, Artificial Sequence
  Description of Artificial Sequence: Synthetic polypeptide
  MOD_RES (158)..(158): Thr or Ser
  MOD_RES (169)..(169): Lys or Arg
  MOD_RES (564)..(564): Ser or Asn
MAADGYLPDWLEDNLSEGIREWWDLKPGAPKPKANQQKQDDGRGLVLPGYKYLGPFNGLDKGEPVNAADAAALEHDKAYDQQLKAGDNPYLRYNHADAEFQERLQEDTSFGGNLGRAVFQAKKRVLEPLGLVEEGAKTAPGKKRPVEQSPQREPDSSXGIGKKGQQPAXKRLNFGQTGDSESVPDPQPLGEPPAAPSGVGSNTMAAGGGAPMADNNEGADGVGNSSGNWHCDSTWLGDRVITTSTRTWALPTYNNHLYKQISNGTSGGSTNDNTYFGYSTPWGYFDFNRFHCHFSPRDWQRLINNNWGFRPKRLNFKLFNIQVKEVTTNEGTKTIANNLTSTVQVFTDSEYQLPYVLGSAHQGCLPPFPADVFMIPQYGYLTLNNGSQAVGRSSFYCLEYFPSQMLRTGNNFQFSYTFEDVPFHSSYAHSQSLDRLMNPLIDQYLYYLSRTQTTGGTAGTQTLQFSQAGPSSMANQAKNWLPGPCYRQQRVSTTTNQNNNSNFAWTGATKYHLNGRDSLVNPGVAMATHKDDEDRFFPSSGVLIFGKQGAGNDNVDYSNVMITXEEEIKTTNPVATEEYGVVATNLQSANTAPQTGTVNSQGALPGMVWQNRDVYLQGPIWAKIPHTDGNFHPSPLMGGFGLKHPPPQILIKNTPVPADPPTTFNQAKLNSFITQYSTGQVSVEIEWELQKENSKRWNPEIQYTSNYYKSTNVDFAVNTEGVYSEPRPIGTRYLTRNL

SEQ ID NO: 135 - protein, 738 aa, Artificial Sequence
  Description of Artificial Sequence: Synthetic polypeptide
  MOD_RES (158)..(158): Thr or Ser
  MOD_RES (169)..(169): Arg or Lys
  MOD_RES (315)..(315): Asn or Ser
  MOD_RES (413)..(413): Gln or Glu
  MOD_RES (472)..(472): Asn, Thr or Ser
  MOD_RES (534)..(534): Asp or Glu
  MOD_RES (542)..(542): Ile or Val
  MOD_RES (595)..(595): Ile or Val
MAADGYLPDWLEDNLSEGIREWWDLKPGAPKPKANQQKQDDGRGLVLPGYKYLGPFNGLDKGEPVNAADAAALEHDKAYDQQLKAGDNPYLRYNHADAEFQERLQEDTSFGGNLGRAVFQAKKRVLEPLGLVEEGAKTAPGKKRPVEQSPQREPDSSXGIGKKGQQPAXKRLNFGQTGDSESVPDPQPLGEPPAAPSGVGSNTMAAGGGAPMADNNEGADGVGSSSGNWHCDSTWLGDRVITTSTRTWALPTYNNHLYKQISNGTSGGSTNDNTYFGYSTPWGYFDFNRFHCHFSPRDWQRLINNNWGFRPKRLXFKLFNIQVKEVTQNEGTKTIANNLTSTIQVFTDSEYQLPYVLGSAHQGCLPPFPADVFMIPQYGYLTLNNGSQAVGRSSFYCLEYFPSQMLRTGNNFXFSYTFEDVPFHSSYAHSQSLDRLMNPLIDQYLYYLSRTQTTGGTAGTQTLQFSQAGPSXMANQAKNWLPGPCYRQQRVSTTTSQNNNSNFAWTGATKYHLNGRDSLVNPGVAMATHKDDEXRFFPSSGXLIFGKQGAGKDNVDYSNVMLTSEEEIKTTNPVATEEYGVVADNLQQQNTAPQXGTVNSQGALPGMVWQNRDVYLQGPIWAKIPHTDGNFHPSPLMGGFGLKHPPPQILIKNTPVPADPPTTFNQAKLNSFITQYSTGQVSVEIEWELQKENSKRWNPEIQYTSNYYKSTNVDFAVNTEGVYSEPRPIGTRYLTRNL

SEQ ID NO: 136 - protein, 738 aa, Artificial Sequence
  Description of Artificial Sequence: Synthetic polypeptide
  MOD_RES (169)..(169): Arg or Lys
  MOD_RES (315)..(315): Asn or Ser
  MOD_RES (534)..(534): Asp or Glu
  MOD_RES (542)..(542): Ile or Val
MAADGYLPDWLEDNLSEGIREWWDLKPGAPKPKANQQKQDDGRGLVLPGYKYLGPFNGLDKGEPVNAADAAALEHDKAYDQQLKAGDNPYLRYNHADAEFQERLQEDTSFGGNLGRAVFQAKKRVLEPLGLVEEGAKTAPGKKRPVEPSPQRSPDSSTGIGKKGQQPAXKRLNFGQTGDSESVPDPQPIGEPPAAPSGVGSGTMAAGGGAPMADNNEGADGVGSSSGNWHCDSTWLGDRVITTSTRTWALPTYNNHLYKQISNGTSGGSTNDNTYFGYSTPWGYFDFNRFHCHFSPRDWQRLINNNWGFRPKRLXFKLFNIQVKEVTQNEGTKTIANNLTSTIQVFTDSEYQLPYVLGSAHQGCLPPFPADVFMIPQYGYLTLNNGSQAVGRSSFYCLEYFPSQMLRTGNNFEFSYTFEDVPFHSSYAHSQSLDRLMNPLIDQYLYYLSRTQSTGGTAGTQQLLFSQAGPSNMSAQAKNWLPGPCYRQQRVSTTLSQNNNSNFAWTGATKYHLNGRDSLVNPGVAMATHKDDEXRFFPSSGXLMFGKQGAGKDNVDYSNVMLTSEEEIKTTNPVATEQYGVVADNLQQQNTAPIVGAVNSQGALPGMVWQNRDVYLQGPIWAKIPHTDGNFHPSPLMGGFGLKHPPPQILIKNTPVPADPPTTFNQAKLNSFITQYSTGQVSVEIEWELQKENSKRWNPEIQYTSNYYKSTNVDFAVNTEGVYSEPRPIGTRYLTRNL

SEQ ID NO: 137 - protein, 738 aa, Artificial Sequence
  Description of Artificial Sequence: Synthetic polypeptide
  MOD_RES (471)..(471): Ser or Asn
MAADGYLPDWLEDNLSEGIREWWDLKPGAPKPKANQQKQDDGRGLVLPGYKYLGPFNGLDKGEPVNAADAAALEHDKAYDQQLKAGDNPYLRYNHADAEFQERLQEDTSFGGNLGRAVFQAKKRVLEPLGLVEEGAKTAPGKKRPVEPSPQRSPDSSTGIGKKGQQPAKKRLNFGQTGDSESVPDPQPIGEPPAGPSGLGSGTMAAGGGAPMADNNEGADGVGSSSGNWHCDSTWLGDRVITTSTRTWALPTYNNHLYKQISNGTSGGSTNDNTYFGYSTPWGYFDFNRFHCHFSPRDWQRLINNNWGFRPKRLNFKLFNIQVKEVTQNEGTKTIANNLTSTIQVFTDSEYQLPYVLGSAHQGCLPPFPADVFMIPQYGYLTLNNGSQAVGRSSFYCLEYFPSQMLRTGNNFEFSYTFEDVPFHSSYAHSQSLDRLMNPLIDQYLYYLSRTQSTGGTAGTQQLLFSQAGPXNMSAQAKNWLPGPCYRQQRVSTTLSQNNNSNFAWTGATKYHLNGRDSLVNPGVAMATHKDDEERFFPSSGVLMFGKQGAGKDNVDYSSVMLTSEEEIKTTNPVATEQYGVVADNLQQQNTAPIVGAVNSQGALPGMVWQNRDVYLQGPIWAKIPHTDGNFHPSPLMGGFGLKHPPPQILIKNTPVPADPPTTFSQAKLASFITQYSTGQVSVEIEWELQKENSKRWNPEIQYTSNYYKSTNVDFAVNTEGTYSEPRPIGTRYLTRNL

SEQ ID NO: 138 - protein, 738 aa, Artificial Sequence
  Description of Artificial Sequence: Synthetic polypeptide
  MOD_RES (157)..(157): Ser or Thr
  MOD_RES (169)..(169): Lys or Arg
  MOD_RES (457)..(457): Ala or Gly
  MOD_RES (463)..(463): Gln or Ala
  MOD_RES (508)..(508): Thr or Ala
  MOD_RES (510)..(510): Tyr or Phe
  MOD_RES (511)..(511): His or Lys
  MOD_RES (558)..(558): Gln or Asn
  MOD_RES (585)..(585): Asn or His
  MOD_RES (587)..(587): Ser or Ala
MAADGYLPDWLEDNLSEGIREWWDLKPGAPKPKANQQKQDDGRGLVLPGYKYLGPFNGLDKGEPVNAADAAALEHDKAYDQQLKAGDNPYLRYNHADAEFQERLQEDTSFGGNLGRAVFQAKKRVLEPLGLVEEGAKTAPGKKRPVEQSPQEPDSSXLGIGKTGQQPAXKRLNFGQTGDSESVPDPQPLGEPPAAPSGVGSNTMASGGGAPMADNNEGADGVGNSSGNWHCDSTWLGDRVITTSTRTWALPTYNNHLYKQISNGTSGGSTNDNTYFGYSTPWGYFDFNRFHCHFSPRDWQRLINNNWGFRPKRLNFKLFNIQVKEVTTNEGTKTIANNLTSTVQVFTDSEYQLPYVLGSAHQGCLPPFPADVFMIPQYGYLTLNNGSQAVGRSSFYCLEYFPSQMLRTGNNFQFSYTFEDVPFHSSYAHSQSLDRLMNPLIDQYLYYLSRTQTTGTXGTQTLXFSQAGPSSMANQARNWVPGPCYRQQRVSTTTNQNNNSNFAWTGAXKXXLNGRDSLMNPGVAMASHKDDEDRFFPSSGVLIFGKQGAGNDNVDYSXVMITNEEEIKTTNPVATEEYGAVATNXQXLANTQAQTGLVHNQGVLPGMVWQNRDVYLQGPIWAKIPHTDGNFHPSPLMGGFGLKHPPPQILIKNTPVPADPPTTFNQAKLNSFITQYSTGQVSVEIEWELQKENSKRWNPEIQYTSNYYKSTNVDFAVNTEGVYSEPRPIGTRYLTRNL

SEQ ID NO: 139 - protein, 737 aa, Artificial Sequence
  Description of Artificial Sequence: Synthetic polypeptide
  MOD_RES (148)..(148): Pro or Gln
  MOD_RES (169)..(169): Lys or Arg
  MOD_RES (314)..(314): Arg or Asn
  MOD_RES (466)..(466): Tyr or His
  MOD_RES (563)..(563): Asn or Ser
  MOD_RES (580)..(580): Val or Ile
  MOD_RES (588)..(588): Ala or Ser
MAADGYLPDWLEDNLSEGIREWWDLKPGAPKPKANQQKQDDGRGLVLPGYKYLGPFNGLDKGEPVNAADAAALEHDKAYDQQLKAGDNPYLRYNHADAEFQERLQEDTSFGGNLGRAVFQAKKRVLEPLGLVEEGAKTAPGKKRPVEXSPQRSPDSSTGIGKKGQQPAXKRLNFGQTGDSESVPDPQPLGEPPAAPSGVGSGTMAAGGGAPMADNNEGADGVGNASGNWHCDSTWLGDRVITTSTRTWALPTYNNHLYKQISSQSAGSTNDNTYFGYSTPWGYFDFNRFHCHFSPRDWQRLINNNWGFRPKKLXFKLFNIQVKEVTTNDGVTTIANNLTSTVQVFSDSEYQLPYVLGSAHQGCLPPFPADVFMIPQYGYLTLNNGSQSVGRSSFYCLEYFPSQMLRTGNNFEFSYTFEDVPFHSSYAHSQSLDRLMNPLIDQYLYYLARTQSTTGGTAGNRELQFXQAGPSTMAEQAKNWLPGPCYRQQRVSKTLDQNNNSNFAWTGATKYHLNGRNSLVNPGVAMATHKDDEDRFFPSSGVLIFGKTGAANKTTLENVLMTXEEEIKTTNPVATEEYGXVSSNLQSXNTAPQTQTVNSQGALPGMVWQNRDVYLQGPIWAKIPHTDGNFHPSPLMGGFGLKHPPPQILIKNTPVPANPPEVFTPAKFASFITQYSTGQVSVEIEWELQKENSKRWNPEIQYTSNYDKSTNVDFAVDSEGVYSEPRPIGTRYLTRNL

SEQ ID NO: 140 - protein, 735 aa, Artificial Sequence
  Description of Artificial Sequence: Synthetic polypeptide
  MOD_RES (162)..(162): Ser or Thr
  MOD_RES (168)..(168): Lys or Arg
  MOD_RES (224)..(224): Ala or Ser
  MOD_RES (310)..(310): Arg or Lys
  MOD_RES (410)..(410): Thr or Gln
  MOD_RES (446)..(446): Ser or Asn
  MOD_RES (461)..(461): Gln or Leu
  MOD_RES (471)..(471): Ala or Ser
  MOD_RES (708)..(708): Ala or Thr
MAADGYLPDWLEDNLSEGIREWWDLKPGAPKPKANQQKQDDGRGLVLPGYKYLGPFNGLDKGEPVNAADAAALEHDKAYDQQLKAGDNPYLRYNHADAEFQERLQEDTSFGGNLGRAVFQAKKRVLEPLGLVEEGAKTAPGKKRPVEQSPQEPDSSSGIGKXGQQPAXKRLNFGQTGDSESVPDPQPLGEPPAAPSGVGSNTMASGGGAPMADNNEGADGVGNXSGNWHCDSTWLGDRVITTSTRTWALPTYNNHLYKQISSQSGASNDNHYFGYSTPWGYFDFNRFHCHFSPRDWQRLINNNWGFRPKXLNFKLFNIQVKEVTTNDGTTTIANNLTSTVQVFTDSEYQLPYVLGSAHQGCLPPFPADVFMIPQYGYLTLNNGSQAVGRSSFYCLEYFPSQMLRTGNNFXFSYTFEDVPFHSSYAHSQSLDRLMNPLIDQYLYYLXRTQTTSGTAQNRELXFSQAGPSSMXNQAKNWLPGPCYRQQRVSKTANDNNNSNFAWTGATKYHLNGRDSLVNPGPAMASHKDDEDKFFPMSGVLIFGKQGAGASNVDLDNVMITDEEEIKTTNPVATEQYGTVATNLQSSNTAPATGTVNSQGALPGMVWQDRDVYLQGPIWAKIPHTDGHFHPSPLMGGFGLKHPPPQILIKNTPVPANPPTTFSPAKFASFITQYSTGQVSVEIEWELQKENSKRWNPEIQYTSNYNKSXNVDFTVDTNGVYSEPRPIGTRYLTRNL

SEQ ID NO: 141 - protein, 735 aa, Artificial Sequence
  Description of Artificial Sequence: Synthetic polypeptide
  MOD_RES (42)..(42): Gly or Ser
  MOD_RES (168)..(168): Arg or Lys
  MOD_RES (310)..(310): Lys or Arg
  MOD_RES (410)..(410): Thr or Gln
  MOD_RES (446)..(446): Ser or Arg
  MOD_RES (461)..(461): Gln or Leu
  MOD_RES (471)..(471): Ala or Ser
  MOD_RES (475)..(475): Lys or Arg
  MOD_RES (504)..(504): Gly or Ala
  MOD_RES (539)..(539): Val or Asn
MAADGYLPDWLEDNLSEGIREWWDLKPGAPQPKANQQHQDDXRGLVLPGYKYLGPFNGLDKGEPVNEADAAALEHDKAYDQQLKAGDNPYLKYNHADAEFQERLQEDTSFGGNLGRAVFQAKKRVLEPLGLVEEAAKTAPGKKRPVEQSPQEPDSSSGIGKSGQQPAXKRLNFGQTGDSESVPDPQPLGEPPAAPSGVGSNTMASGGGAPMADNNEGADGVGNSSGNWHCDSTWLGDRVITTSTRTWALPTYNNHLYKQISSQSGASNDNHYFGYSTPWGYFDFNRFHCHFSPRDWQRLINNNWGFRPKXLNFKLFNIQVKEVTQNDGTTTIANNLTSTVQVFTDSEYQLPYVLGSAHQGCLPPFPADVFMIPQYGYLTLNNGSQAVGRSSFYCLEYFPSQMLRTGNNFXFSYTFEDVPFHSSYAHSQSLDRLMNPLIDQYLYYLXRTQTTSGTTQQSRLXFSQAGPSSMXQQAXNWLPGPCYRQQRVSKTANDNNNSNFAWTXATKYHLNGRDSLVNPGPAMASHKDDEEKFFPMHGXLIFGKQGTGASNVDLDNVMITDEEEIRTTNPVATEQYGTVATNLQSSNTAPATGTVNSQGALPGMVWQDRDVYLQGPIWAKIPHTDGHFHPSPLMGGFGLKHPPPQILIKNTPVPANPPTTFSPAKFASFITQYSTGQVSVEIEWELQKENSKRWNPEIQYTSNYNKSVNVDFTVDTNGVYSEPRPIGTRYLTRNL

SEQ ID NO: 142 - protein, 736 aa, Adeno-associated virus
MAADGYLPDWLEDNLSEGIREWWDLKPGAPKPKANQQKQDDGRGLVLPGYKYLGPFNGLDKGEPVNAADAAALEHDKAYDQQLKAGDNPYLRYNHADAEFQERLQEDTSFGGNLGRAVFQAKKRVLEPLGLVEEGAKTAPGKKRPVEQSPQEPDSSSGIGKKGQQPARKRLNFGQTGDSESVPDPQPLGEPPAAPSGVGSNTMAAGGGAPMADNNEGADGVGNASGNWHCDSTWLGDRVITTSTRTWALPTYNNHLYKQISSQSGGSTNDNTYFGYSTPWGYFDFNRFHCHFSPRDWQRLINNNWGFRPKKLNFKLFNIQVKEVTTNDGTTTIANNLTSTVQVFTDSEYQLPYVLGSAHQGCLPPFPADVFMIPQYGYLTLNNGSQAVGRSSFYCLEYFPSQMLRTGNNFQFSYTFEDVPFHSSYAHSQSLDRLMNPLIDQYLYYLSRTQTTSGTAGNRTLQFSQAGPSSMANQAKNWLPGPCYRQQRVSKTTNQNNNSNFAWTGATKYHLNGRDSLVNPGPAMATHKDDEDKFFPMSGVLIFGKQGAGNSNVDLDNVMITNEEEIKTTNPVATEEYGTVATNLQSANTAPATGTVNSQGALPGMVWQDRDVYLQGPIWAKIPHTDGHFHPSPLMGGFGLKHPPPQILIKNTPVPANPPTTFSPAKFASFITQYSTGQVSVEIEWELQKENSKRWNPEIQYTSNYNKSTNVDFAVDTNGVYSEPRPIGTRYLTRNL

SEQ ID NO: 143 - protein, 736 aa, Artificial Sequence
  Description of Artificial Sequence: Synthetic polypeptide
MAADGYLPDWLEDNLSEGIREWWDLKPGAPKPKANQQKQDDGRGLVLPGYKYLGPFNGLDKGEPVNAADAAALEHDKAYDQQLKAGDNPYLRYNHADAEFQERLQEDTSFGGNLGRAVFQAKKRVLEPLGLVEEGAKTAPGKKRPVEQSPQEPDSSSGIGKKGQQPAKKRLNFGQTGDSESVPDPQPLGEPPAAPSGVGSNTMAAGGGAPMADNNEGADGVGNASGNWHCDSTWLGDRVITTSTRTWALPTYNNHLYKQISSQSGASTNDNTYFGYSTPWGYFDFNRFHCHFSPRDWQRLINNNWGFRPKRLNFKLFNIQVKEVTTNDGTTTIANNLTSTVQVFTDSEYQLPYVLGSAHQGCLPPFPADVFMIPQYGYLTLNNGSQAVGRSSFYCLEYFPSQMLRTGNNFEFSYTFEDVPFHSSYAHSQSLDRLMNPLIDQYLYYLSRTQTTSGTAGNRTLQFSQAGPSSMANQAKNWLPGPCYRQQRVSKTANQNNNSNFAWTGATKYHLNGRDSLVNPGPAMATHKDDEDKFFPMSGVLIFGKQGAGNSNVDLDNVMITSEEEIKTTNPVATEQYGTVATNLQSSNTAPATGTVNSQGALPGMVWQNRDVYLQGPIWAKIPHTDGHFHPSPLMGGFGLKHPPPQILIKNTPVPANPPTTFSPAKFASFITQYSTGQVSVEIEWELQKENSKRWNPEIQYTSNYNKSTNVDFAVDTNGVYSEPRPIGTRYLTRNL

SEQ ID NO: 144 - protein, 736 aa, Artificial Sequence
  Description of Artificial Sequence: Synthetic polypeptide
MAADGYLPDWLEDNLSEGIREWWDLKPGAPKPKANQQKQDDGRGLVLPGYKYLGPFNGLDKGEPVNAADAAALEHDKAYDQQLKAGDNPYLRYNHADAEFQERLQEDTSFGGNLGRAVFQAKKRVLEPLGLVEEGAKTAPGKKRPVEQSPQEPDSSSGIGKKGQQPARKRLNFGQTGDSESVPDPQPLGEPPAAPSGVGSNTMAAGGGAPMADNNEGADGVGNASGNWHCDSTWLGDRVITTSTRTWALPTYNNHLYKQISSQSGGSTNDNTYFGYSTPWGYFDFNRFHCHFSPRDWQRLINNNWGFRPKRLNFKLFNIQVKEVTTNDGTTTIANNLTSTVQVFTDSEYQLPYVLGSAHQGCLPPFPADVFMIPQYGYLTLNNGSQAVGRSSFYCLEYFPSQMLRTGNNFEFSYTFEDVPFHSSYAHSQSLDRLMNPLIDQYLYYLSRTQTTSGTAGNRTLQFSQAGPSSMANQAKNWLPGPCYRQQRVSKTANQNNNSNFAWTGATKYHLNGRDSLVNPGPAMATHKDDEDKFFPMSGVLIFGKQGAGNSNVDLDNVMITNEEEIKTTNPVATEQYGTVATNLQSANTAPATGTVNSQGALPGMVWQDRDVYLQGPIWAKIPHTDGHFHPSPLMGGFGLKHPPPQILIKNTPVPANPPTTFSPAKFASFITQYSTGQVSVEIEWELQKENSKRWNPEIQYTSNYNKSTNVDFAVDTNGVYSEPRPIGTRYLTRNL

SEQ ID NO: 145 - protein, 736 aa, Artificial Sequence
  Description of Artificial Sequence: Synthetic polypeptide
MAADGYLPDWLEDNLSEGIREWWDLKPGAPKPKANQQKQDDGRGLVLPGYKYLGPFNGLDKGEPVNAADAAALEHDKAYDQQLKAGDNPYLRYNHADAEFQERLQEDTSFGGNLGRAVFQAKKRVLEPLGLVEEGAKTAPGKKRPVEQSPQEPDSSSGIGKKGQQPAKKRLNFGQTGDSESVPDPQPLGEPPAAPSGVGSNTMAAGGGAPMADNNEGADGVGNASGNWHCDSTWLGDRVITTSTRTWALPTYNNHLYKQISSQSGGSTNDNTYFGYSTPWGYFDFNRFHCHFSPRDWQRLINNNWGFRPKKLNFKLFNIQVKEVTTNDGTTTIANNLTSTVQVFTDSEYQLPYVLGSAHQGCLPPFPADVFMIPQYGYLTLNNGSQAVGRSSFYCLEYFPSQMLRTGNNFEFSYTFEDVPFHSSYAHSQSLDRLMNPLIDQYLYYLSRTQTTSGTAGNRTLQFSQAGPSSMANQAKNWLPGPCYRQQRVSKTANQNNNSNFAWTGATKYHLNGRDSLVNPGPAMATHKDDEDKFFPMSGVLIFGKQGAGNSNVDLDNVMITSEEEIKTTNPVATEQYGTVATNLQSSNTAPATGTVNSQGALPGMVWQNRDVYLQGPIWAKIPHTDGHFHPSPLMGGFGLKHPPPQILIKNTPVPANPPTTFSPAKFASFITQYSTGQVSVEIEWELQKENSKRWNPEIQYTSNYNKSTNVDFAVDTNGVYSEPRPIGTRYLTRNL

SEQ ID NO: 146 - protein, 736 aa, Artificial Sequence
  Description of Artificial Sequence: Synthetic polypeptide
MAADGYLPDWLEDNLSEGIREWWDLKPGAPKPKANQQKQDDGRGLVLPGYKYLGPFNGLDKGEPVNAADAAALEHDKAYDQQLKAGDNPYLRYNHADAEFQERLQEDTSFGGNLGRAVFQAKKRVLEPLGLVEEGAKTAPGKKRPVEQSPQEPDSSSGIGKKGQQPAKKRLNFGQTGDSESVPDPQPLGEPPAAPSGVGSNTMASGGGAPMADNNEGADGVGNASGNWHCDSTWLGDRVITTSTRTWALPTYNNHLYKQISSQSGGSTNDNTYFGYSTPWGYFDFNRFHCHFSPRDWQRLINNNWGFRPKKLNFKLFNIQVKEVTTNDGTTTIANNLTSTVQVFTDSEYQLPYVLGSAHQGCLPPFPADVFMIPQYGYLTLNNGSQAVGRSSFYCLEYFPSQMLRTGNNFEFSYTFEDVPFHSSYAHSQSLDRLMNPLIDQYLYYLSRTQTTSGTAGNRTLQFSQAGPSSMANQAKNWLPGPCYRQQRVSKTANQNNNSNFAWTGATKYHLNGRDSLVNPGPAMATHKDDEDKFFPMSGVLIFGKQGAGNSNVDLDNVMITSEEEIKTTNPVATEEYGTVATNLQSSNTAPATGTVNSQGALPGMVWQNRDVYLQGPIWAKIPHTDGHFHPSPLMGGFGLKHPPPQILIKNTPVPANPPTTFSPAKFASFITQYSTGQVSVEIEWELQKENSKRWNPEIQYTSNYNKSTNVDFAVDTNGVYSEPRPIGTRYLTRNL

SEQ ID NO: 147 - protein, 736 aa, Artificial Sequence
  Description of Artificial Sequence: Synthetic polypeptide
MAADGYLPDWLEDNLSEGIREWWDLKPGAPKPKANQQKQDDGRGLVLPGYKYLGPFNGLDKGEPVNAADAAALEHDKAYDQQLKAGDNPYLRYNHADAEFQERLQEDTSFGGNLGRAVFQAKKRVLEPLGLVEEGAKTAPGKKRPVEQSPQEPDSSSGIGKKGQQPAKKRLNFGQTGDSESVPDPQPLGEPPAAPSGVGSNTMASGGGAPMADNNEGADGVGNASGNWHCDSTWLGDRVITTSTRTWALPTYNNHLYKQISSQSGGSTNDNTYFGYSTPWGYFDFNRFHCHFSPRDWQRLINNNWGFRPKKLNFKLFNIQVKEVTTNDGTTTIANNLTSTVQVFTDSEYQLPYVLGSAHQGCLPPFPADVFMIPQYGYLTLNNGSQAVGRSSFYCLEYFPSQMLRTGNNFQFSYTFEDVPFHSSYAHSQSLDRLMNPLIDQYLYYLSRTQTTSGTAGNRELQFSQAGPSSMANQAKNWLPGPCYRQQRVSKTTNQNNNSNFAWTGATKYHLNGRDSLVNPGPAMATHKDDEDKFFPMSGVLIFGKQGAGNSNVDLDNVMITNEEEIKTTNPVATEQYGTVATNLQSANTAPATGTVNSQGALPGMVWQDRDVYLQGPIWAKIPHTDGHFHPSPLMGGFGLKHPPPQILIKNTPVPANPPTTFSPAKFASFITQYSTGQVSVEIEWELQKENSKRWNPEIQYTSNYNKSTNVDFAVDTNGVYSEPRPIGTRYLTRNL

SEQ ID NO: 148 - protein, 736 aa, Artificial Sequence
  Description of Artificial Sequence: Synthetic polypeptide
MAADGYLPDWLEDNLSEGIREWWDLKPGAPKPKANQQKQDDGRGLVLPGYKYLGPFNGLDKGEPVNAADAAALEHDKAYDQQLKAGDNPYLRYNHADAEFQERLQEDTSFGGNLGRAVFQAKKRVLEPLGLVEEGAKTAPGKKRPVEQSPQEPDSSSGIGKKGQQPAKKRLNFGQTGDSESVPDPQPLGEPPAAPSGVGSNTMASGGGAPMADNNEGADGVGNASGNWHCDSTWLGDRVITTSTRTWALPTYNNHLYKQISSQSGASTNDNTYFGYSTPWGYFDFNRFHCHFSPRDWQRLINNNWGFRPKRLNFKLFNIQVKEVTTNDGTTTIANNLTSTVQVFTDSEYQLPYVLGSAHQGCLPPFPADVFMIPQYGYLTLNNGSQAVGRSSFYCLEYFPSQMLRTGNNFQFSYTFEDVPFHSSYAHSQSLDRLMNPLIDQYLYYLSRTQTTSGTAGNRELQFSQAGPSSMANQAKNWLPGPCYRQQRVSKTTNQNNNSNFAWTGATKYHLNGRDSLVNPGPAMATHKDDEDKFFPMSGVLIFGKQGAGNSNVDLDNVMITNEEEIKTTNPVATEEYGTVATNLQSANTAPATGTVNSQGALPGMVWQNRDVYLQGPIWAKIPHTDGHFHPSPLMGGFGLKHPPPQILIKNTPVPANPPTTFSPAKFASFITQYSTGQVSVEIEWELQKENSKRWNPEIQYTSNYNKSTNVDFAVDTNGVYSEPRPIGTRYLTRNL

SEQ ID NO: 149 - protein, 736 aa, Artificial Sequence
  Description of Artificial Sequence: Synthetic polypeptide
MAADGYLPDWLEDNLSEGIREWWDLKPGAPKPKANQQKQDDGRGLVLPGYKYLGPFNGLDKGEPVNAADAAALEHDKAYDQQLKAGDNPYLRYNHADAEFQERLQEDTSFGGNLGRAVFQAKKRVLEPLGLVEEGAKTAPGKKRPVEQSPQEPDSSSGIGKKGQQPARKRLNFGQTGDSESVPDPQPLGEPPAAPSGVGSNTMAAGGGAPMADNNEGADGVGNASGNWHCDSTWLGDRVITTSTRTWALPTYNNHLYKQISSQSGGSTNDNTYFGYSTPWGYFDFNRFHCHFSPRDWQRLINNNWGFRPKRLNFKLFNIQVKEVTTNDGTTTIANNLTSTVQVFTDSEYQLPYVLGSAHQGCLPPFPADVFMIPQYGYLTLNNGSQAVGRSSFYCLEYFPSQMLRTGNNFEFSYTFEDVPFHSSYAHSQSLDRLMNPLIDQYLYYLSRTQTTSGTAGNRELQFSQAGPSSMANQAKNWLPGPCYRQQRVSKTTNQNNNSNFAWTGATKYHLNGRDSLVNPGPAMATHKDDEDKFFPMSGVLIFGKQGAGNSNVDLDNVMITSEEEIKTTNPVATEEYGTVATNLQSSNTAPATGTVNSQGALPGMVWQERDVYLQGPIWAKIPHTDGHFHPSPLMGGFGLKHPPPQILIKNTPVPANPPTTFSPAKFASFITQYSTGQVSVEIEWELQKENSKRWNPEIQYTSNYNKSTNVDFAVDTNGVYSEPRPIGTRYLTRNL

SEQ ID NO: 150 - protein, 736 aa, Artificial Sequence
  Description of Artificial Sequence: Synthetic polypeptide
MAADGYLPDWLEDNLSEGIREWWDLKPGAPKPKANQQKQDDGRGLVLPGYKYLGPFNGLDKGEPVNAADAAALEHDKAYDQQLKAGDNPYLRYNHADAEFQERLQEDTSFGGNLGRAVFQAKKRVLEPLGLVEEGAKTAPGKKRPVEQSPQEPDSSSGIGKKGQQPARKRLNFGQTGDSESVPDPQPLGEPPAAPSGVGSNTMASGGGAPMADNNEGADGVGNASGNWHCDSTWLGDRVITTSTRTWALPTYNNHLYKQISSQSGGSTNDNTYFGYSTPWGYFDFNRFHCHFSPRDWQRLINNNWGFRPKKLNFKLFNIQVKEVTTNDGTTTIANNLTSTVQVFTDSEYQLPYVLGSAHQGCLPPFPADVFMIPQYGYLTLNNGSQAVGRSSFYCLEYFPSQMLRTGNNFEFSYTFEDVPFHSSYAHSQSLDRLMNPLIDQYLYYLSRTQTTSGTAGNRELQFSQAGPSSMANQAKNWLPGPCYRQQRVSKTTNQNNNSNFAWTGATKYHLNGRDSLVNPGPAMATHKDDEDKFFPMSGVLIFGKQGAGNSNVDLDNVMITSEEEIKTTNPVATEEYGTVATNLQSANTAPATGTVNSQGALPGMVWQDRDVYLQGPIWAKIPHTDGHFHPSPLMGGFGLKHPPPQILIKNTPVPANPPTTFSPAKFASFITQYSTGQVSVEIEWELQKENSKRWNPEIQYTSNYNKSTNVDFAVDTNGVYSEPRPIGTRYLTRNL

SEQ ID NO: 151 - protein, 738 aa, Artificial Sequence
  Description of Artificial Sequence: Synthetic polypeptide
MAADGYLPDWLEDNLSEGIREWWDLKPGAPKPKANQQKQDDGRGLVLPGYKYLGPFNGLDKGEPVNAADAAALEHDKAYDQQLKAGDNPYLRYNHADAEFQERLQEDTSFGGNLGRAVFQAKKRVLEPLGLVEEGAKTAPGKKRPVEQSPQREPDSSTGIGKSGQQPAKKRLNFGQTGDSESVPDPQPLGEPPAAPSGVGSNTMASGGGAPMADNNEGADGVGNSSGNWHCDSTWLGDRVITTSTRTWALPTYNNHLYKQISNGTSGGSTNDNTYFGYSTPWGYFDFNRFHCHFSPRDWQRLINNNWGFRPKRLNFKLFNIQVKEVTTNEGTKTIANNLTSTVQVFTDSEYQLPYVLGSAHQGCLPPFPADVFMIPQYGYLTLNNGSQAVGRSSFYCLEYFPSQMLRTGNNFQFSYTFEDVPFHSSYAHSQSLDRLMNPLIDQYLYYLSRTQTTGGTAGTQTLQFSQAGPSSMANQARNWVPGPCYRQQRVSTTTNQNNNSNFAWTGATKYHLNGRDSLMNPGVAMASHKDDEDRFFPSSGVLIFGKQGAGNDNVDYSNVMITSEEEIKTTNPVATEEYGVVATNHQSANTQAQTGTVQNQGILPGMVWQNRDVYLQGPIWAKIPHTDGNFHPSPLMGGFGLKHPPPQILIKNTPVPADPPTTFNQAKLNSFITQYSTGQVSVEIEWELQKENSKRWNPEIQYTSNYYKSTNVDFAVNTEGVYSEPRPIGTRYLTRNL

SEQ ID NO: 152 - protein, 738 aa, Artificial Sequence
  Description of Artificial Sequence: Synthetic polypeptide
MAADGYLPDWLEDNLSEGIREWWDLKPGAPKPKANQQKQDNGRGLVLPGYKYLGPFNGLDKGEPVNAADAAALEHDKAYDQQLQAGDNPYLRYNHADAEFQERLQEDTSFGGNLGRAVFQAKKRVLEPLGLVESPVKTAPGKKRPVEPSPQRSPDSSTGIGKKGQQPAKKRLNFGQTGDSESVPDPQPIGEPPAGPSGLGSGTMAAGGGAPMADNNEGADGVGSSSGNWHCDSTWLGDRVITTSTRTWALPTYNNHLYKQISNGTSGGSTNDNTYFGYSTPWGYFDFNRFHCHFSPRDWQRLINNNWGFRPKRLNFKLFNIQVKEVTQNEGTKTIANNLTSTIQVFTDSEYQLPYVLGSAHQGCLPPFPADVFMIPQYGYLTLNNGSQAVGRSSFYCLEYFPSQMLRTGNNFEFSYNFEDVPFHSSYAHSQSLDRLMNPLIDQYLYYLSRTQSTGGTAGTQQLLFSQAGPNNMSAQAKNWLPGPCYRQQRVSTTLSQNNNSNFAWTGATKYHLNGRDSLVNPGVAMATHKDDEERFFPSSGVLMFGKQGAGKDNVDYSSVMLTSEEEIKTTNPVATEQYGVVADNLQQQNAAPIVGAVNSQGALPGMVWQNRDVYLQGPIWAKIPHTDGNFHPSPLMGGFGLKHPPPQLLIKNTPVPADPPTTFNQAKLASFLTQYSTGQVSVEIEWELQKENSKRWNPEIQYTSNYYKSTNVDFAVNTEGTYSEPRPIGTRYLTRNL
